United States Patent Application Publication US 2006/0084054 A1 - sequence listing, part 2

SEQ ID NO: 285 - DNA, 9087 bp, Homo sapiens
  CDS (1)..(9084)
atggcgccgccgccgccgcccgtgctgcccgtgctgctgctcctggccgccgccgccgccctgccggcgatggggctgcgagcggccgcctgggagccgcgcgtacccggcgggacccgcgccttcgccctccggcccggctgtacctacgcggtgggcgccgcttgcacgccccgggcgccgcgggagctgctggacgtgggccgcgatgggcggctggcaggacgtcggcgcgtctcgggcgcggggcgcccgctgccgctgcaagtccgcttggtggcccgcagtgccccgacggcgctgagccgccgcctgcgggcgcgcacgcaccttcccggctgcggagcccgtgcccggctctgcggaaccggtgcccggctctgcggggcgctctgcttccccgtccccggcggctgcgcggccgcgcagcattcggcgctcgcagctccgaccaccttacccgcctgccgctgcccgccgcgccccaggccccgctgtcccggccgtcccatctgcctgccgccgggcggctcggtccgcctgcgtctgctgtgcgccctgcggcgcgcggctggcgccgtccgggtgggactggcgctggaggccgccaccgcggggacgccctccgcgtcgccatccccatcgccgcccctgccgccgaacttgcccgaagcccgggcggggccggcgcgacgggcccggcggggcacgagcggcagagggagcctgaagtttccgatgcccaactaccaggtggcgttgtttgagaacgaaccggcgggcaccctcatcctccagctgcacgcgcactacaccatcgagggcgaggaggagcgcgtgagctattacatggaggggctgttcgacgagcgctcccggggctacttccgaatcgactctgccacgggcgccgtgagcacggacagcgtactggaccgcgagaccaaggagacgcacgtcctcagggtgaaagccgtggactacagtacgccgccgcgctcggccaccacctacatcactgtcttggtcaaagacaccaacgaccacagcccggtcttcgagcagtcggagtaccgcgagcgcgtgcgggagaacctggaggtgggctacgaggtgctgaccatccgcgccagcgaccgcgactcgcccatcaacgccaacttgcgttaccgcgtgttggggggcgcgtgggacgtcttccagctcaacgagagctctggcgtggtgagcacacgggcggtgctggaccgggaggaggcggccgagtaccagctcctggtggaggccaacgaccaggggcgcaatccgggcccgctcagtgccacggccaccgtgtacatcgaggtggaggacgagaacgacaactacccccagttcagcgagcagaactacgtggtccaggtgcccgaggacgtggggctcaacacggctgtgctgcgagtgcaggccacggaccgggaccagggccagaacgcggccattcactacagcatcctcagcgggaacgtggccggccagttctacctgcactcgctgagcgggatcctggatgtgatcaaccccttggatttcgaggatgtccagaaatactcgctgagcattaaggcccaggatgggggccggcccccgctcatcaattcttcaggggtggtgtctgtgcaggtgctggatgtcaacgacaacgagcctatctttgtgagcagccccttccaggccacggtgctggagaatgtgcccctgggctaccccgtggtgcacattcaggcggtggacgcggactctggagagaacgcccggctgcactatcgcctggtggacacggcctccacctttctggggggcggcagcgctgggcctaagaatcctgcccccacccctgacttccccttccagatccacaacagctccggttggatcacagtgtgtgccgagctggaccgcgaggaggtggagcactacagcttcggggtggaggcggtggaccacggctcgccccccatgagctcctccaccagcgtgtccatcacggtgctggacgtgaatgacaacgacccggtgttcacgcagcccacctacgagcttcgtctgaatgaggatgcggccgtggggagcagcgtgctgaccctgcaggcccgcgaccgtgacgccaacagtgtgattacctaccagctcacaggcggcaacacccggaaccgctttgcactcagcagccagagagggggcggcctcatcaccctggcgctacctctggactacaagcaggagcagcagtacgtgctggcggtgacagcatccgacggcacacggtcgcacactgcgcatgtcctaatcaacgtcactgatgccaacacccacaggcctgtctttcagagctcccattacacagtgagtgtcagtgaggacaggcctgtgggcacctccattgctaccctcagtgccaacgatgaggacacaggagagaatgcccgcatcacctacgtgattcaggaccccgtgccgcagttccgcattgaccccgacagtggcaccatgtacaccatgatggagctggactatgagaaccaggtcgcctacacgctgaccatcatggcccaggacaacggcatcccgcagaaatcagacaccaccaccctagagatcctcatcctcgatgccaatgacaatgcaccccagttcctgtgggatttctaccagggttccatctttgaggatgctccaccctcgaccagcatcctccaggtctctgccacggaccgggactcaggtcccaatgggcgtctgctgtacaccttccagggtggggacgacggcgatggggacttctacatcgagcccacgtccggtgtgattcgcacccagcgccggctggaccgggagaatgtggccgtgtacaacctttgggctctggctgtggatcggggcagtcccactccccttagcgcctcggtagaaatccaggtgaccatcttggacattaatgacaatgcccccatgtttgagaaggacgaactggagctgtttgttgaggagaacaacccagtggggtcggtggtggcaaagattcgtgctaacgaccctgatgaaggccctaatgcccagatcatgtatcagattgtggaaggggacatgcggcatttcttccagctggacctgctcaacggggacctgcgtgccatggtggagctggactttgaggtccggcgggagtatgtgctggtggtgcaggccacgtcggctccgctggtgagccgagccacggtgcacatccttctcgtggaccagaatgacaacccgcctgtgctgcccgacttccagatcctcttcaacaactatgtcaccaacaagtccaacagtttccccaccggcgtgatcggctgcatcccggcccatgaccccgacgtgtcagacagcctcaactacaccttcgtgcagggcaacgagctgcgcctgttgctgctggaccccgccacgggcgaactgcagctcagccgcgacctggacaacaaccggccgctggaggcgctcatggaggtgtctgtgtctgcagatggcatccacagcgtcacggccttctgcaccctgcgtgtcaccatcatcacggacgacatgctgaccaacagcatcactgtccgcctggagaacatgtcccaggagaagttcctgtccccgctgctggccctcttcgtggagggggtggccgccgtgctgtccaccaccaaggacgacgtcttcgtcttcaacgtccagaacgacaccgacgtcagctccaacatcctgaacgtgaccttctcggcgctgctgcctggcggcgtccgcggccagttcttcccgtcggaggacctgcaggagcagatctacctgaatcggacgctgctgaccaccatctccacgcagcgcgtgctgcccttcgacgacaacatctgcctgcgcgagccctgcgagaactacatgaagtgcgtgtccgttctgcgattcgacagctccgcgcccttcctcagctccaccaccgtgctcttccggcccatccaccccatcaacggcctgcgctgccgctgcccgcccggcttcaccggcgactactgcgagacggagatcgacctctgctactccgacccgtgcggcgccaacggccgctgccgcagccgcgagggcggctacacctgcgagtgcttcgaggacttcactggagagcactgtgaggtggatgcccgctcaggccgctgtgccaacggggtgtgcaagaacgggggcacctgcgtgaacctgctcatcggcggcttccactgcgtgtgtcctcctggcgagtatgagaggccctactgtgaggtgaccaccaggagcttcccgccccagtccttcgtcaccttccggggcctgagacagcgcttccacttcaccatctccctcacgtttgccactcaggaaaggaacggcttgcttctctacaacggccgcttcaatgagaagcacgacttcatcgccctggagatcgtggacgagcaggtgcagctcaccttctctgcaggtgcaggcgagacaacaacgaccgtggcaccgaaggttcccagtggtgtgagtgacgggcggtggcactctgtgcaggtgcagtactacaacaaggtaagatgggccccaccacttccccctggcccccagcccaatattggccacctgggcctgccccatgggccgtccggggaaaagatggccgtggtgacagtggatgattgtgacacaaccatggctgtgcgctttggaaaggacatcgggaactacagctgcgctgcccagggcactcagaccggctccaagaagtccctggatctgaccggccctctactcctggggggtgtccccaacctgccagaagacttcccagtgcacaaccggcagttcgtgggctgcatgcggaacctgtcagtcgacggcaaaaatgtggacatggccggattcatcgccaacaatggcacccgggaaggctgcgctgctcggaggaacttctgcgatgggaggcggtgtcagaatggaggcacctgtgtcaacaggtggaatatgtatctgtgtgagtgtccactccgattcggcgggaagaactgtgagcaagccatgcctcacccccagctcttcagcggtgagagcgtcgtgtcctggagtgacctgaacatcatcatctctgtgccctggtacctggggctcatgttccggacccggaaggaggacagcgttctgatggaggccaccagtggtgggcccaccagctttcgcctccagatcctgaacaactacctccagtttgaggtgtcccacggcccctccgatgtggagtccgtgatgctgtccgggttgcgggtgaccgacggggagtggcaccacctgctgatcgagctgaagaatgttaaggaggacagtgagatgaagcacctggtcaccatgaccttggactatgggatggaccagaacaaggcagatatcgggggcatgcttcccgggctgacggtaaggagcgtggtggtcggaggcgcctctgaagacaaggtctccgtgcgccgtggattccgaggctgcatgcagggagtgaggatgggggggacgcccaccaacgtcgccaccctgaacatgaacaacgcactcaaggtcagggtgaaggacggctgtgatgtggacgacccctgtacctcgagcccctgtccccccaatagccgctgccacgacgcctgggaggactacagctgcgtctgtgacaaagggtaccttggaataaactgtgtggatgcctgtcacctgaacccctgcgagaacatgggggcctgcgtgcgctcccccggctccccgcagggctacgtgtgcgagtgtgggcccagtcactacgggccgtactgtgagaacaaactcgaccttccgtgccccagaggctggtgggggaaccccgtctgtggaccctgccactgtgccgtcagcaaaggctttgatcccgactgtaataagaccaacggccagtgccaatgcaaggagaattactacaagctcctagcccaggacacctgtctgccctgcgactgcttcccccatggctcccacagccgcacttgcgacatggccaccgggcagtgtgcctgcaagcccggcgtcatcggccgccagtgcaaccgctgcgacaacccgtttgccgaggtcaccacgctcggctgtgaagtgatctacaatggctgtcccaaagcatttgaggccggcatctggtggccacagaccaagttcgggcagccggctgcggtgccatgccctaagggatccgttggaaatgcggtccgacactgcagcggggagaagggctggctgcccccagagctctttaactgtaccaccatctccttcgtggacctcagggccatgaatgagaagctgagccgcaatgagacgcaggtggacggcgccagggccctgcagctggtgagggcgctgcgcagtgctacacagcacacgggcacgctctttggcaatgacgtgcgcacggcctaccagctgctgggccacgtccttcagcacgagagctggcagcagggcttcgacctggcagccacgcaggacgccgactttcacgaggacgtcatccactcgggcagcgccctcctggccccagccaccagggcggcgtgggagcagatccagcggagcgagggcggcacggcacagctgctccggcgcctcgagggctacttcagcaacgtggcacgcaacgtgcggcggacgtacctgcggcccttcgtcatcgtcaccgccaacatggttcttgctgtcgacatctttgacaagttcaactttacgggagccagggtcccgcgattcgacaccatccatgaagagttccccagggagctggagtcctccgtctccttcccagccgacttcttcagaccacctgaagaaaaagaaggccccctgctgaggccggctggccggaggaccaccccgcagaccacgcgcccggggcctggcaccgagagggaggccccgatcagcaggcggaggcgacaccctgatgacgctggccagttcgccgtcgctctggtcatcatttaccgcaccctggggcagctcctgcccgagcgctacgaccccgaccgtcgcagcctccggttgcctcaccggcccatcattaataccccgatggtgagcacgctggtgtacagcgagggggctccgctcccgagacccctggagaggcccgtcctggtggagttcgccctgctggaggtggaggagcgaaccaagcctgtctgcgtgttctggaaccactccctggccgttggtgggacgggagggtggtctgcccggggctgcgagctcctgtccaggaaccggacacatgtcgcctgccagtgcagccacacagccagctttgcggtgctcatggatatctccaggcgtgagaacggggaggtcctgcctctgaagattgtcacctatgccgctgtgtccttgtcactggcagccctgctggtggccttcgtcctcctgagcctggtccgcatgctgcgctccaacctgcacagcattcacaagcacctcgccgtggcgctcttcctctctcagctggtgttcgtgattgggatcaaccagacggaaaacccgtttctgtgcacagtggttgccatcctcctccactacatctacatgagcacctttgcctggaccctcgtggagagcctgcatgtctaccgcatgctgaccgaggtgcgcaacatcgacacggggcccatgcggttctactacgtcgtgggctggggcatcccggccattgtcacaggactggcggtcggcctggacccccagggctacgggaaccccgacttctgctggctgtcgcttcaagacaccctgatttggagctttgcggggcccatcggagctgttataatcatcaacacagtcacttctgtcctatctgcaaaggtttcctgccaaagaaagcaccattattatgggaaaaaagggatcgtctccctgctgaggaccgcattcctcctgctgctgctcatcagcgccacctggctgctggggctgctggctgtgaaccgcgatgcactgagctttcactacctcttcgccatcttcagcggcttacagggccccttcgtcctccttttccactgcgtgctcaaccaggaggtccggaagcacctgaagggcgtgctcggcgggaggaagctgcacctggaggactccgccaccaccagggccaccctgctgacgcgctccctcaactgcaacaccaccttcggtgacgggcctgacatgctgcgcacagacttgggcgagtccaccgcctcgctggacagcatcgtcagggatgaagggatccagaagctcggcgtgtcctctgggctggtgaggggcagccacggagagccagacgcgtccctcatgcccaggagctgcaaggatccccctggccacgattccgactcagatagcgagctgtccctggatgagcagagcagctcttacgcctcctcacactcgtcagacagcgaggacgatggggtgggagctgaggaaaaatgggacccggccaggggcgccgtccacagcacacccaaaggggacgctgtggccaaccacgttccggccggctggcccgaccagagcctggctgagagtgacagtgaggaccccagcggcaagccccgcctgaaggtggagaccaaggtcagcgtggagctgcaccgcgaggagcagggcagtcaccgtggagagtaccccccggaccaggagagcgggggcgcagccaggcttgctagcagccagcccccagagcagaggagcatcttgaaaaataaagtcacctacccgccgccgctgacgctgacggagcagacgctgaagggccggctccgggagaagctggccgactgtgagcagagccccacatcctcgcgcacgtcttccctgggctctggcggccccgactgcgccatcacagtcaagagccctgggagggagccggggcgtgaccacctcaacggggtggccatgaatgtgcgcactgggagcgcccaggccgatggctccgactctgagaaaccgtga

SEQ ID NO: 286 - protein, 3028 aa, Homo sapiens; identical to SEQ ID NO: 276

SEQ ID NO: 287 - DNA, 9087 bp, Homo sapiens
  CDS (1)..(9084)
atggcgccgccgccgccgcccgtgctgcccgtgctgctgctcctggccgccgccgccgccctgccggcgatggggctgcgagcggccgcctgggagccgcgcgtacccggcgggacccgcgccttcgccctccggcccggctgtacctacgcggtgggcgccgcttgcacgccccgggcgccgcgggagctgctggacgtgggccgcgatgggcggctggcaggacgtcggcgcgtctcgggcgcggggcgcccgctgccgctgcaagtccgcttggtggcccgcagtgccccgacggcgctgagccgccgcctgcgggcgcgcacgcaccttcccggctgcggagcccgtgcccggctctgcggaaccggtgcccggctctgcggggcgctctgcttccccgtccccggcggctgcgcggccgcgcagcattcggcgctcgcagctccgaccaccttacccgcctgccgctgcccgccgcgccccaggccccgctgtcccggccgtcccatctgcctgccgccgggcggctcggtccgcctgcgtctgctgtgcgccctgcggcgcgcggctggcgccgtccgggtgggactggcgctggaggccgccaccgcggggacgccctccgcgtcgccatccccatcgccgcccctgccgccgaacttgcccgaagcccgggcggggccggcgcgacgggcccggcggggcacgagcggcagagggagcctgaagtttccgatgcccaactaccaggtggcgttgtttgagaacgaaccggcgggcaccctcatcctccagctgcacgcgcactacaccatcgagggcgaggaggagcgcgtgagctattacatggaggggctgttcgacgagcgctcccggggctacttccgaatcgactctgccacgggcgccgtgagcacggacagcgtactggaccgcgagaccaaggagacgcacgtcctcagggtgaaagccgtggactacagtacgccgccgcgctcggccaccacctacatcactgtcttggtcaaagacaccaacgaccacagcccggtcttcgagcagtcggagtaccgcgagcgcgtgcgggagaacctggaggtgggctacgaggtgctgaccatccgcgccagcgaccgcgactcgcccatcaacgccaacttgcgttaccgcgtgttggggggcgcgtgggacgtcttccagctcaacgagagctctggcgtggtgagcacacgggcggtgctggaccgggaggaggcggccgagtaccagctcctggtggaggccaacgaccaggggcgcaatccgggcccgctcagtgccacggccaccgtgtacatcgaggtggaggacgagaacgacaactacccccagttcagcgagcagaactacgtggtccaggtgcccgaggacgtggggctcaacacggctgtgctgcgagtgcaggccacggaccgggaccagggccagaacgcggccattcactacagcatcctcagcgggaacgtggccggccagttctacctgcactcgctgagcgggatcctggatgtgatcaaccccttggatttcgaggatgtccagaaatactcgctgagcattaaggcccaggatgggggccggcccccgctcatcaattcttcaggggtggtgtctgtgcaggtgctggatgtcaacgacaacgagcctatctttgtgagcagccccttccaggccacggtgctggagaatgtgcccctgggctaccccgtggtgcacattcaggcggtggacgcggactctggagagaacgcccggctgcactatcgcctggtggacacggcctccacctttctggggggcggcagcgctgggcctaagaatcctgcccccacccctgacttccccttccagatccacaacagctccggttggatcacagtgtgtgccgagctggaccgcgaggaggtggagcactacagcttcggggtggaggcggtggaccacggctcgccccccatgagctcctccaccagcgtgtccatcacggtgctggacgtgaatgacaacgacccggtgttcacgcagcccacctacgagcttcgtctgaatgaggatgcggccgtggggagcagcgtgctgaccctgcaggcccgcgaccgtgacgccaacagtgtgattacctaccagctcacaggcggcaacacccggaaccgctttgcactcagcagccagagagggggcggcctcatcaccctggcgctacctctggactacaagcaggagcagcagtacgtgctggcggtgacagcatccgacggcacacggtcgcacactgcgcatgtcctaatcaacgtcactgatgccaacacccacaggcctgtctttcagagctcccattacacagtgagtgtcagtgaggacaggcctgtgggcacctccattgctaccctcagtgccaacgatgaggacacaggagagaatgcccgcatcacctacgtgattcaggaccccgtgccgcagttccgcattgaccccgacagtggcaccatgtacaccatgatggagctggactatgagaaccaggtcgcctacacgctgaccatcatggcccaggacaacggcatcccgcagaaatcagacaccaccaccctagagatcctcatcctcgatgccaatgacaatgcaccccagttcctgtgggatttctaccagggttccatctttgaggatgctccaccctcgaccagcatcctccaggtctctgccacggaccgggactcaggtcccaatgggcgtctgctgtacaccttccagggtggggacgacggcgatggggacttctacatcgagcccacgtccggtgtgattcgcacccagcgccggctggaccgggagaatgtggccgtgtacaacctttgggctctggctgtggatcggggcagtcccactccccttagcgcctcggtagaaatccaggtgaccatcttggacattaatgacaatgcccccatgtttgagaaggacgaactggagctgtttgttgaggagaacaacccagtggggtcggtggtggcaaagattcgtgctaacgaccctgatgaaggccctaatgcccagatcatgtatcagattgtggaaggggacatgcggcatttcttccagctggacctgctcaacggggacctgcgtgccatggtggagctggactttgaggtccggcgggagtatgtgctggtggtgcaggccacgtcggctccgctggtgagccgagccacggtgcacatccttctcgtggaccagaatgacaacccgcctgtgctgcccgacttccagatcctcttcaacaactatgtcaccaacaagtccaacagtttccccaccggcgtgatcggctgcatcccggcccatgaccccgacgtgtcagacagcctcaactacaccttcgtgcagggcaacgagctgcgcctgttgctgctggaccccgccacgggcgaactgcagctcagccgcgacctggacaacaaccggccgctggaggcgctcatggaggtgtctgtgtctgcagatggcatccacagcgtcacggccttctgcaccctgcgtgtcaccatcatcacggacgacatgctgaccaacagcatcactgtccgcctggagaacatgtcccaggagaagttcctgtccccgctgctggccctcttcgtggagggggtggccgccgtgctgtccaccaccaaggacgacgtcttcgtcttcaacgtccagaacgacaccgacgtcagctccaacatcctgaacgtgaccttctcggcgctgctgcctggcggcgtccgcggccagttcttcccgtcggaggacctgcaggagcagatctacctgaatcggacgctgctgaccaccatctccacgcagcgcgtgctgcccttcgacgacaacatctgcctgcgcgagccctgcgagaactacatgaagtgcgtgtccgttctgcgattcgacagctccgcgcccttcctcagctccaccaccgtgctcttccggcccatccaccccatcaacggcctgcgctgccgctgcccgcccggcttcaccggcgactactgcgagacggagatcgacctctgctactccgacccgtgcggcgccaacggccgctgccgcagccgcgagggcggctacacctgcgagtgcttcgaggacttcactggagagcactgtgaggtggatgcccgctcaggccgctgtgccaacggggtgtgcaagaacgggggcacctgcgtgaacctgctcatcggcggcttccactgcgtgtgtcctcctggcgagtatgagaggccctactgtgaggtgaccaccaggagcttcccgccccagtccttcgtcaccttccggggcctgagacagcgcttccacttcaccatctccctcacgtttgccactcaggaaaggaacggcttgcttctctacaacggccgcttcaatgagaagcacgacttcatcgccctggagatcgtggacgagcaggtgcagctcaccttctctgcaggtgcaggcgagacaacaacgaccgtggcaccgaaggttcccagtggtgtgagtgacgggcggtggcactctgtgcaggtgcagtactacaacaaggtaagatgggccccaccacttccccctggcccccagcccaatattggccacctgggcctgccccatgggccgtccggggaaaagatggccgtggtgacagtggatgattgtgacacaaccatggctgtgcgctttggaaaggacatcgggaactacagctgcgctgcccagggcactcagaccggctccaagaagtccctggatctgaccggccctctactcctggggggtgtccccaacctgccagaagacttcccagtgcacaaccggcagttcgtgggctgcatgcggaacctgtcagtcgacggcaaaaatgtggacatggccggattcatcgccaacaatggcacccgggaaggctgcgctgctcggaggaacttctgcgatgggaggcggtgtcagaatggaggcacctgtgtcaacaggtggaatatgtatctgtgtgagtgtccactccgattcggcgggaagaactgtgagcaagccatgcctcacccccagctcttcagcggtgagagcgtcgtgtcctggagtgacctgaacatcatcatctctgtgccctggtacctggggctcatgttccggacccggaaggaggacagcgttctgatggaggccaccagtggtgggcccaccagctttcgcctccagatcctgaacaactacctccagtttgaggtgtcccacggcccctccgatgtggagtccgtgatgctgtccgggttgcgggtgaccgacggggagtggcaccacctgctgatcgagctgaagaatgttaaggaggacagtgagatgaagcacctggtcaccatgaccttggactatgggatggaccagaacaaggcagatatcgggggcatgcttcccgggctgacggtaaggagcgtggtggtcggaggcgcctctgaagacaaggtctccgtgcgccgtggattccgaggctgcatgcagggagtgaggatgggggggacgcccaccaacgtcgccaccctgaacatgaacaacgcactcaaggtcagggtgaaggacggctgtgatgtggacgacccctgtacctcgagcccctgtccccccaatagccgctgccacgacgcctgggaggactacagctgcgtctgtgacaaagggtaccttggaataaactgtgtggatgcctgtcacctgaacccctgcgagaacatgggggcctgcgtgcgctcccccggctccccgcagggctacgtgtgcgagtgtgggcccagtcactacgggccgtactgtgagaacaaactcgaccttccgtgccccagaggctggtgggggaaccccgtctgtggaccctgccactgtgccgtcagcaaaggctttgatcccgactgtaataagaccaacggccagtgccaatgcaaggagaattactacaagctcctagcccaggacacctgtctgccctgcgactgcttcccccatggctcccacagccgcacttgcgacatggccaccgggcagtgtgcctgcaagcccggcgtcatcggccgccagtgcaaccgctgcgacaacccgtttgccgaggtcaccacgctcggctgtgaagtgatctacaatggctgtcccaaagcatttgaggccggcatctggtggccacagaccaagttcgggcagccggctgcggtgccatgccctaagggatccgttggaaatgcggtccgacactgcagcggggagaagggctggctgcccccagagctctttaactgtaccaccatctccttcgtggacctcagggccatgaatgagaagctgagccgcaatgagacgcaggtggacggcgccagggccctgcagctggtgagggcgctgcgcagtgctacacagcacacgggcacgctctttggcaatgacgtgcgcacggcctaccagctgctgggccacgtccttcagcacgagagctggcagcagggcttcgacctggcagccacgcaggacgccgactttcacgaggacgtcatccactcgggcagcgccctcctggccccagccaccagggcggcgtgggagcagatccagcggagcgagggcggcacggcacagctgctccggcgcctcgagggctacttcagcaacgtggcacgcaacgtgcggcggacgtacctgcggcccttcgtcatcgtcaccgccaacatggttcttgctgtcgacatctttgacaagttcaactttacgggagccagggtcccgcgattcgacaccatccatgaagagttccccagggagctggagtcctccgtctccttcccagccgacttcttcagaccacctgaagaaaaagaaggccccctgctgaggccggctggccggaggaccaccccgcagaccacgcgcccggggcctggcaccgagagggaggccccgatcagcaggcggaggcgacaccctgatgacgctggccagttcgccgtcgctctggtcatcatttaccgcaccctggggcagctcctgcccgagcgctacgaccccgaccgtcgcagcctccggttgcctcaccggcccatcattaataccccgatggtgagcacgctggtgtacagcgagggggctccgctcccgagacccctggagaggcccgtcctggtggagttcgccctgctggaggtggaggagcgaaccaagcctgtctgcgtgttctggaaccactccctggccgttggtgggacgggagggtggtctgcccggggctgcgagctcctgtccaggaaccggacacatgtcgcctgccagtgcagccacacagccagctttgcggtgctcatggatatctccaggcgtgagaacggggaggtcctgcctctgaagattgtcacctatgccgctgtgtccttgtcactggcagccctgctggtggccttcgtcctcctgagcctggtccgcatgctgcgctccaacctgcacagcattcacaagcacctcgccgtggcgctcttcctctctcagctggtgttcgtgattgggatcaaccagacggaaaacccgtttctgtgcacagtggttgccatcctcctccactacatctacatgagcacctttgcctggaccctcgtggagagcctgcatgtctaccgcatgctgaccgaggtgcgcaacatcgacacggggcccatgcggttctactacgtcgtgggctggggcatcccggccattgtcacaggactggcggtcggcctggacccccagggctacgggaaccccgacttctgctggctgtcgcttcaagacaccctgatttggagctttgcggggcccatcggagctgttataatcatcaacacagtcacttctgtcctatctgcaaaggtttcctgccaaagaaagcaccattattatgggaaaaaagggatcgtctccctgctgaggaccgcattcctcctgctgctgctcatcagcgccacctggctgctggggctgctggctgtgaaccgcgatgcactgagctttcactacctcttcgccatcttcagcggcttacagggccccttcgtcctccttttccactgcgtgctcaaccaggaggtccggaagcacctgaagggcgtgctcggcgggaggaagctgcacctggaggactccgccaccaccagggccaccctgctgacgcgctccctcaactgcaacaccaccttcggtgacgggcctgacatgctgcgcacagacttgggcgagtccaccgcctcgctggacagcatcgtcagggatgaagggatccagaagctcggcgtgtcctctgggctggtgaggggcagccacggagagccagacgcgtccctcatgcccaggagctgcaaggatccccctggccacgattccgactcagatagcgagctgtccctggatgagcagagcagctcttacgcctcctcacactcgtcagacagcgaggacgatggggtgggagctgaggaaaaatgggacccggccaggggcgccgtccacagcacccccaaaggggacgctgtggccaaccacgttccggccggctggcccgaccagagcctggctgagagtgacagtgaggaccccagcggcaagccccgcctgaaggtggagaccaaggtcagcgtggagctgcaccgcgaggagcagggcagtcaccgtggacagtaccccccggaccaggagagcgggggcgcagccaggcttgctagcagccagcccccagagcagaggagcatcttgaaaaataaagtcacctacccgccgccgctgacgctgacggagcagacgctgaagggccggctccgggagaagctggccgactgtgagcagagccccacatcctcgcgcacgtcttccctgggctctggcggccccgactgcgccatcacagtcaagagccctgggagggagccggggcgtgaccacctcaacggggtggccatgaatgtgcgcactgggagcgcccaggccgatggctccgactctgagaaaccgtga

SEQ ID NO: 288 - protein, 3028 aa, Homo sapiens
MAPPPPPVLPVLLLLAAAAALPAMGLRAAAWEPRVPGGTRAFALRPGCTYAVGAACTPRAPRELLDVGRDGRLAGRRRVSGAGRPLPLQVRLVARSAPTALSRRLRARTHLPGCGARARLCGTGARLCGALCFPVPGGCAAAQHSALAAPTTLPACRCPPRPRPRCPGRPICLPPGGSVRLRLLCALRRAAGAVRVGLALEAATAGTPSASPSPSPPLPPNLPEARAGPARRARRGTSGRGSLKFPMPNYQVALFENEPAGTLILQLHAHYTIEGEEERVSYYMEGLFDERSRGYFRIDSATGAVSTDSVLDRETKETHVLRVKAVDYSTPPRSATTYITVLVKDTNDHSPVFEQSEYRERVRENLEVGYEVLTIRASDRDSPINANLRYRVLGGAWDVFQLNESSGVVSTRAVLDREEAAEYQLLVEANDQGRNPGPLSATATVYIEVEDENDNYPQFSEQNYVVQVPEDVGLNTAVLRVQATDRDQGQNAAIHYSILSGNVAGQFYLHSLSGILDVINPLDFEDVQKYSLSIKAQDGGRPPLINSSGVVSVQVLDVNDNEPIFVSSPFQATVLENVPLGYPVVHIQAVDADSGENARLHYRLVDTASTFLGGGSAGPKNPAPTPDFPFQIHNSSGWITVCAELDREEVEHYSFGVEAVDHGSPPMSSSTSVSITVLDVNDNDPVFTQPTYELRLNEDAAVGSSVLTLQARDRDANSVITYQLTGGNTRNRFALSSQRGGGLITLALPLDYKQEQQYVLAVTASDGTRSHTAHVLINVTDANTHRPVFQSSHYTVSVSEDRPVGTSIATLSANDEDTGENARITYVIQDPVPQFRIDPDSGTMYTMMELDYENQVAYTLTIMAQDNGIPQKSDTTTLEILILDANDNAPQFLWDFYQGSIFEDAPPSTSILQVSATDRDSGPNGRLLYTFQGGDDGDGDFYIEPTSGVIRTQRRLDRENVAVYNLWALAVDRGSPTPLSASVEIQVTILDINDNAPMFEKDELELFVEENNPVGSVVAKIRANDPDEGPNAQIMYQIVEGDMRHFFQLDLLNGDLRAMVELDFEVRREYVLVVQATSAPLVSRATVHILLVDQNDNPPVLPDFQILFNNYVTNKSNSFPTGVIGCIPAHDPDVSDSLNYTFVQGNELRLLLLDPATGELQLSRDLDNNRPLEALMEVSVSADGIHSVTAFCTLRVTIITDDMLTNSITVRLENMSQEKFLSPLLALFVEGVAAVLSTTKDDVFVFNVQNDTDVSSNILNVTFSALLPGGVRGQFFPSEDLQEQIYLNRTLLTTISTQRVLPFDDNICLREPCENYMKCVSVLRFDSSAPFLSSTTVLFRPIHPINGLRCRCPPGFTGDYCETEIDLCYSDPCGANGRCRSREGGYTCECFEDFTGEHCEVDARSGRCANGVCKNGGTCVNLLIGGFHCVCPPGEYERPYCEVTTRSFPPQSFVTFRGLRQRFHFTISLTFATQERNGLLLYNGRFNEKHDFIALEIVDEQVQLTFSAGAGETTTTVAPKVPSGVSDGRWHSVQVQYYNKVRWAPPLPPGPQPNIGHLGLPHGPSGEKMAVVTVDDCDTTMAVRFGKDIGNYSCAAQGTQTGSKKSLDLTGPLLLGGVPNLPEDFPVHNRQFVGCMRNLSVDGKNVDMAGFIANNGTREGCAARRNFCDGRRCQNGGTCVNRWNMYLCECPLRFGGKNCEQAMPHPQLFSGESVVSWSDLNIIISVPWYLGLMFRTRKEDSVLMEATSGGPTSFRLQILNNYLQFEVSHGPSDVESVMLSGLRVTDGEWHHLLIELKNVKEDSEMKHLVTMTLDYGMDQNKADIGGMLPGLTVRSVVVGGASEDKVSVRRGFRGCMQGVRMGGTPTNVATLNMNNALKVRVKDGCDVDDPCTSSPCPPNSRCHDAWEDYSCVCDKGYLGINCVDACHLNPCENMGACVRSPGSPQGYVCECGPSHYGPYCENKLDLPCPRGWWGNPVCGPCHCAVSKGFDPDCNKTNGQCQCKENYYKLLAQDTCLPCDCFPHGSHSRTCDMATGQCACKPGVIGRQCNRCDNPFAEVTTLGCEVIYNGCPKAFEAGIWWPQTKFGQPAAVPCPKGSVGNAVRHCSGEKGWLPPELFNCTTISFVDLRAMNEKLSRNETQVDGARALQLVRALRSATQHTGTLFGNDVRTAYQLLGHVLQHESWQQGFDLAATQDADFHEDVIHSGSALLAPATRAAWEQIQRSEGGTAQLLRRLEGYFSNVARNVRRTYLRPFVIVTANMVLAVDIFDKFNFTGARVPRFDTIHEEFPRELESSVSFPADFFRPPEEKEGPLLRPAGRRTTPQTTRPGPGTEREAPISRRRRHPDDAGQFAVALVIIYRTLGQLLPERYDPDRRSLRLPHRPIINTPMVSTLVYSEGAPLPRPLERPVLVEFALLEVEERTKPVCVFWNHSLAVGGTGGWSARGCELLSRNRTHVACQCSHTASFAVLMDISRRENGEVLPLKIVTYAAVSLSLAALLVAFVLLSLVRMLRSNLHSIHKHLAVALFLSQLVFVIGINQTENPFLCTVVAILLHYIYMSTFAWTLVESLHVYRMLTEVRNIDTGPMRFYYVVGWGIPAIVTGLAVGLDPQGYGNPDFCWLSLQDTLIWSFAGPIGAVIIINTVTSVLSAKVSCQRKHHYYGKKGIVSLLRTAFLLLLLISATWLLGLLAVNRDALSFHYLFAIFSGLQGPFVLLFHCVLNQEVRKHLKGVLGGRKLHLEDSATTRATLLTRSLNCNTTFGDGPDMLRTDLGESTASLDSIVRDEGIQKLGVSSGLVRGSHGEPDASLMPRSCKDPPGHDSDSDSELSLDEQSSSYASSHSSDSEDDGVGAEEKWDPARGAVHSTPKGDAVANHVPAGWPDQSLAESDSEDPSGKPRLKVETKVSVELHREEQGSHRGQYPPDQESGGAARLASSQPPEQRSILKNKVTYPPPLTLTEQTLKGRLREKLADCEQSPTSSRTSSLGSGGPDCAITVKSPGREPGRDHLNGVAMNVRTGSAQADGSDSEKP

SEQ ID NO: 289 - DNA, 2268 bp, Homo sapiens
  CDS (1)..(2265)
atgcttcccgggtgtatattcttgatgattttactcattcctcaggttaaagaaaagttcatccttggagtagagggtcaacaactggttcgtcctaaaaagcttcctctgatacagaagcgagatactggacacacccatgatgatgacatactgaaaacgtatgaagaagaattgttgtatgaaataaaactaaatagaaaaaccttagtccttcatcttctaagatccagggagttcctaggctcaaattacagtgaaacattctactccatgaaaggagaagcgttcaccaggcatcctcagatcatggaacactgttactataaaggaaacatcctaaatgaaaagaattctgttgccagcatcagtacttgtgacgggttgaggggattcttcagaataaacgaccaaagatacctcattgaaccagtgaaatactcagatgagggagaacatttggtgttcaaatataacctgagggtgccgtatggtgccaattattcctgtacagagcttaattttaccagaaaaactgttccaggggataatgaatctgaagaagactccaaaataaaaggcatccatgatgaaaagtatgttgaattgttcattgttgctgatgatactgtgtatcgcagaaatggtcatcctcacaataaactaaggaaccgaatttggggaatggtcaattttgtcaacatgatttataaaaccttaaacatccatgtgacgttggttggcattgaaatatggacacatgaagataaaatagaactatattcaaatatagaaactaccttattgcgtttttcattttggcaagaaaagatccttaaaacacggaaggattttgatcatgttgtattactcagtgggaagtggctctactcacatgtgcaaggaatttcttatccagggggtatgtgcctgccctattattccaccagtatcattaaggatcttttacctgacacaaacataattgcaaacagaatggcacatcaactggggcataaccttgggatgcagcatgacgagttcccatgcacctgtccttcaggaaaatgcgtgatggacagtgatggaagcattcctgcactgaaattcagtaaatgcagccaaaaccaataccaccagtacttgaaggattataagccaacatgcatgctcaacattccatttccttacaattttcatgatttccaattttgtggaaacaagaagttggatgagggtgaagagtgtgactgtggccctgctcaggagtgtactaatccttgctgtgatgcacacacatgtgtactgaagccaggatttacttgtgcagaaggagaatgctgtgaatcttgtcagataaaaaaagcagggtccatatgcagaccggcgaaagatgaatgtgattttcctgagatgtgcactggccactcgcctgcctgtcctaaggaccagttcagggtcaatggatttccttgcaagaactcagaaggctactgtttcatggggaaatgtccaactcgtgaggatcagtgctctgaactatttgatgatgaggcaatagagagtcatgatatctgctacaagatgaatacaaaaggaaataaatttggatactgcaaaaacaaggaaaacagatttcttccctgtgaggagaaggatgtcagatgtggaaagatctactgcactggaggggagctttcctctctccttggagaagacaagacttatcaccttaaggatccccagaagaatgctactgtcaaatgcaaaactatttttttataccatgattctacagacattggcctggtggcgtcaggaacaaaatgtggagagggaatggtatgcaacaatggtgaatgtctaaacatggaaaaggtctatatctcaaccaattgcccctctcagtgcaatgaaaatcctgtagatggccacggactccagtgccactgtgaggaaggacaggcacctgtagcctgtgaagaaaccttacatgttaccagtatcaccatcttggttgttgtgcttgtcctggttattgtcggtatcggagttcttatactattagttcgttaccgaaaatgtatcaagttgaagcaagttcagagcccacctacagaaaccctgggagtggagaacaaaggatactttggtgatgagcagcagataaggactgagccaatcctgccagaaattcatttcctaaataaacctgcaagtaaagattcaagaggaatcgcagatcccaatcaaagtgccaagtggtag

SEQ ID NO: 290 - protein, 755 aa, Homo sapiens
MLPGCIFLMILLIPQVKEKFILGVEGQQLVRPKKLPLIQKRDTGHTHDDDILKTYEEELLYEIKLNRKTLVLHLLRSREFLGSNYSETFYSMKGEAFTRHPQIMEHCYYKGNILNEKNSVASISTCDGLRGFFRINDQRYLIEPVKYSDEGEHLVFKYNLRVPYGANYSCTELNFTRKTVPGDNESEEDSKIKGIHDEKYVELFIVADDTVYRRNGHPHNKLRNRIWGMVNFVNMIYKTLNIHVTLVGIEIWTHEDKIELYSNIETTLLRFSFWQEKILKTRKDFDHVVLLSGKWLYSHVQGISYPGGMCLPYYSTSIIKDLLPDTNIIANRMAHQLGHNLGMQHDEFPCTCPSGKCVMDSDGSIPALKFSKCSQNQYHQYLKDYKPTCMLNIPFPYNFHDFQFCGNKKLDEGEECDCGPAQECTNPCCDAHTCVLKPGFTCAEGECCESCQIKKAGSICRPAKDECDFPEMCTGHSPACPKDQFRVNGFPCKNSEGYCFMGKCPTREDQCSELFDDEAIESHDICYKMNTKGNKFGYCKNKENRFLPCEEKDVRCGKIYCTGGELSSLLGEDKTYHLKDPQKNATVKCKTIFLYHDSTDIGLVASGTKCGEGMVCNNGECLNMEKVYISTNCPSQCNENPVDGHGLQCHCEEGQAPVACEETLHVTSITILVVVLVLVIVGIGVLILLVRYRKCIKLKQVQSPPTETLGVENKGYFGDEQQIRTEPILPEIHFLNKPASKDSRGIADPNQSAKW

SEQ ID NO: 291 - DNA, 2431 bp, Homo sapiens
  CDS (51)..(2384)
gaactccttttctcaagcacttctgctctcctctaccagaatcactcagaatgcttcccgggtgtatattcttgatgattttactcattcctcaggttaaagaaaagttcatccttggagtagagggtcaacaactggttcgtcctaaaaagcttcctctgatacagaagcgagatactggacacacccatgatgatgacataaaaacgtatgaagaagaattgttgtatgaaataaaactaaatagaaaaaccttagtccttcatcttctaagatccaggagggagttcctaggctcaaattacagtgaaacattctactccatgaaaggagaagcgttcaccaggcatcctcagatcatggatcattgtttttaccaaggatccatagtacacgaatatgattcagctgccagtatcagtacgtgtaatggtctaaggggattcttcagaataaacgaccaaagatacctcattgaaccagtgaaatactcagatgagggagaacatttggtgttcaaatataacctgagggtgccgtatggtgccaattattcctgtacagagcttaattttaccagaaaaactgttccaggggataatgaatctgaagaagactccaaaataaaacagggcatccatgatgaaaagtatgttgaattgttcattgttgctgatgatactgtgtatcgcagaaatggtcatcctcacaataaactaaggaaccgaatttggggaatggtcaattttgtcaacatgatttataaaaccttaaacatccatgtgacgttggttggcattgaaatatggacacatgaagataaaatagaactatattcaaatatagaaactaccttattgcgtttttcattttggcaagaaaagatccttaaaacacggaaggattttgatcatgttgtattactcagtgggaagtggctctactcacatgtgcaaggaatttcttatccagggggtatgtgcctgccctattattccaccagtatcattaaggatcttttacctgacacaaacataattgcaaacagaatggcacatcaactggggcataaccttgggatgcagcatgacgagttcccatgcacctgtccttcaggaaaatgcgtgatggacagtgatggaagcattcctgcactgaaattcagtaaatgcagccaaaaccaataccaccagtacttgaaggattataagccaacatgcatgctcaacattccatttccttacaattttcatgatttccaattttgtggaaacaagaagttggatgagggtgaagagtgtgactgtggccctgctcaggagtgtactaatccttgctgtgatgcacacacatgtgtactgaagccaggatttacttgtgcagaaggagaatgctgtgaatcttgtcagataaaaaaagcagggtccatatgcagaccggcgaaagatgaatgtgattttcctgagatgtgcactggccactcgcctgcctgtcctaaggaccagttcagggtcaatggatttccttgcaagaactcagaaggctactgtttcatggggaaatgtccaactcgtgaggatcagtgctctgaactatttgatgatgaggcaatagagagtcatgatatctgctacaagatgaatacaaaaggaaataaatttggatactgcaaaaacaaggaaaacagatttcttccctgtgaggagaaggatgtcagatgtggaaagatctactgcactggaggggagctttcctctctccttggagaagacaagacttatcaccttaaggatccccagaagaatgctactgtcaaatgcaaaactatttttttataccatgattctacagacattggcctggtggcgtcaggaacaaaatgtggagagggaatggtatgcaacaatggtgaatgtctaaacatggaaaaggtctatatctcaaccaattgcccctctcagtgcaatgaaaatcctgtagatggccacggactccagtgccactgtgaggaaggacaggcacctgtagcctgtgaagaaaccttacatgttaccagtatcaccatcttggttgttgtgcttgtcctggttattgtcggtatcggagttcttatactattagttcgttaccgaaaatgtatcaagttgaagcaagttcagagcccacctacagaaaccctgggagtggagaacaaaggatactttggtgatgagcagcagataaggactgagccaatcctgccagaaattcatttcctaaatcagagaactccagaatccttggaaagcctgcccactagtttttcaagtccccactacatcacactgaaacctgcaagtaaagattcaagaggaatcgcagatcccaatcaaagtgccaagtggtaggttaccctgacagatagtacctcccttttttatttttcaaatgc

SEQ ID NO: 292 - protein, 778 aa, Homo sapiens
MLPGCIFLMILLIPQVKEKFILGVEGQQLVRPKKLPLIQKRDTGHTHDDDIKTYEEELLYEIKLNRKTLVLHLLRSRREFLGSNYSETFYSMKGEAFTRHPQIMDHCFYQGSIVHEYDSAASISTCNGLRGFFRINDQRYLIEPVKYSDEGEHLVFKYNLRVPYGANYSCTELNFTRKTVPGDNESEEDSKIKQGIHDEKYVELFIVADDTVYRRNGHPHNKLRNRIWGMVNFVNMIYKTLNIHVTLVGIEIWTHEDKIELYSNIETTLLRFSFWQEKILKTRKDFDHVVLLSGKWLYSHVQGISYPGGMCLPYYSTSIIKDLLPDTNIIANRMAHQLGHNLGMQHDEFPCTCPSGKCVMDSDGSIPALKFSKCSQNQYHQYLKDYKPTCMLNIPFPYNFHDFQFCGNKKLDEGEECDCGPAQECTNPCCDAHTCVLKPGFTCAEGECCESCQIKKAGSICRPAKDECDFPEMCTGHSPACPKDQFRVNGFPCKNSEGYCFMGKCPTREDQCSELFDDEAIESHDICYKMNTKGNKFGYCKNKENRFLPCEEKDVRCGKIYCTGGELSSLLGEDKTYHLKDPQKNATVKCKTIFLYHDSTDIGLVASGTKCGEGMVCNNGECLNMEKVYISTNCPSQCNENPVDGHGLQCHCEEGQAPVACEETLHVTSITILVVVLVLVIVGIGVLILLVRYRKCIKLKQVQSPPTETLGVENKGYFGDEQQIRTEPILPEIHFLNQRTPESLESLPTSFSSPHYITLKPASKDSRGIADPNQSAKW

SEQ ID NO: 293 - DNA, 2583 bp, Homo sapiens
  CDS (85)..(2346)
gatccctgcagtggaagtgaggaggaagaaaggtgaactccttttctcaagcacttctgctctcctctaccagaatcactcagaatgcttcccgggtgtatattcttgatgattttactcattcctcaggttaaagaaaagttcatccttggagtagagggtcaacaactggttcgtcctaaaaagcttcctctgatacagaagcgagatactggacacacccatgatgatgacatactgaaaacgtatgaagaagaattgttgtatgaaataaaactaaatagaaaaaccttagtccttcatcttctaagatccagggagttcctaggctcaaattacagtgaaacattctactccatgaaaggaggagcgttcaccaggcatcctcagatcatggatcattgtttttaccaaggatccatagtacacgaatatgattcagctgccagtatcagtacgtgtaatggtctaaggggattcttcagaataaacgaccaaagatacctcattgaaccagtgaaatactcagatgagggagaacatttggtgttcaaatataacctgagggtgccgtatggtgccaattattcctgtacagagcttaattttaccagaaaaactgttccaggggataatgaatctgaagaagactccaaaataaaaggcatccatgatgaaaagtatgttgaattgttcattgttgctgatgatactgtgtatcgcagaaatggtcatcctcacaataaactaaggaaccgaatttggggaatggtcaattttgtcaacatgatttataaaaccttaaacatccatgtgacgttggttggcattgaaatatggacacatgaagataaaatagaactatattcaaatatagaaactaccttattgcgtttttcattttggcaagaaaagatccttaaaacacggaaggattttgatcatgttgtattactcagtgggaagtggctctactcacatgtgcaaggaatttcttatccagggggtatgtgcctgccctattattccaccagtatcattaaggatcttttacctgacacaaacataattgcaaacagaatggcacatcaactggggcataaccttgggatgcagcatgacgagttcccatgcacctgtccttcaggaaaatgcgtgatggacagtgatggaagcattcctgcactgaaattcagtaaatgcagccaaaaccaataccaccagtacttgaaggattataagccaacatgcatgctcaacattccatttccttacaattttcatgatttccaattttgtggaaacaagaagttggatgagggtgaagagtgtgactgtggccctgctcaggagtgtactaatccttgctgtgatgcacacacatgtgtactgaagccaggatttacttgtgcagaaggagaatgctgtgaatcttgtcagataaaaaaagcagggtccatatgcagaccggcgaaagatgaatgtgattttcctgagatgtgcactggccactcgcctgcctgtcctaaggaccagttcagggtcaatggatttccttgcaagaactcagaaggctactgtttcatggggaaatgtccaactcgtgaggatcagtgctctgaactatttgatgatgatgcaatagagagtcatgatatctgctacaagatgaatacaaaaggaaataaatttggatactgcaaaaacaaggaaaacagatttcttccctgtgaggagaaagatgtcagatgtggaaagatctactgcactggaggggagctttcctctctccttggagaagacaagacttatcaccttaaggatccccagaagaatgctactgtcaaatgcaaaactatttttttataccatgattctacagacattggcctggtggcgtcaggaacaaaatgtggagagggaatggtgtgcaacaatggtgaatgtctaaacatggaaaaggtctatatctcaaccaattgcccctctcagtgcaatgaaaatcctgtggatggccacggactccagtgccactgtgaggaaggacaggcacctgtagcctgtgaagaaaccttacatgttaccaatatcaccatcttggttgttgtgcttgtcctggttattgtcggtatcggagttcttatactattagttcgttaccgaaaatgtatcaagttgaagcaagttcagagcccacctacagaaaccctgggagtggagaacaaaggatactttggtgatgagcagcagataaggactgagccaatcctgccagaaattcatttcctaaataaacctgcaagtaaagattcaagaggaatcgcagatcccaatcaaagtgccaagtgagcttgaagttggatatccaaaatggccgtgcaagcttaggctggggattctggatgcaacgtctttacaaccttacctagatatctgctactcacatttttggtagtgtttcaaacgttctttatccagacagacaatgtttaagagaaacaacttatttctgttaatatttaccggtagaattcacaccctctatcataaacatatgctgcagaaaaaaaaaaaaaaaaaaaa

SEQ ID NO: 294 - protein, 754 aa, Homo sapiens [sequence omitted]

SEQ ID NO: 295 - DNA, 2274 bp, Homo sapiens
  CDS (4)..(2271)
agaatgcttcccgggtgtatattcttgatgattttactcattcctcaggttaaagaaaagttcatccttggagtagagggtcaacaactggttcgtcctaaaaagcttcctctgatacagaagcgagatactggacacacccatgatgatgacataaaaacgtatgaagaagaattgttgtatgaaataaaactaaatagaaaaaccttagtccttcatcttctaagatccaggagggagttcctaggctcaaattacagtgaaacattctactccatgaaaggagaagcgttcaccaggcatcctcagatcatggatcattgtttttaccaaggatccatagtacacgaatatgattcagctgccagtatcagtacgtgtaatggtctaaggggattcttcagaataaacgaccaaagatacctcattgaaccagtgaaatactcagatgagggagaacatttggtgttcaaatataacctgagggtgccgtatggtgccaattattcctgtacagagcttaattttaccagaaaaactgttccaggggataatgaatctgaagaagactccaaaataaaacagggcatccatgatgaaaagtatgttgaattgttcattgttgctgatgatactgtgtatcgcagaaatggtcatcctcacaataaactaaggaaccgaatttggggaatggtcaattttgtcaacatgatttataaaaccttaaacatccatgtgacgttggttggcattgaaatatggacacatgaagataaaatagaactatattcaaatatagaaactaccttattgcgtttttcattttggcaagaaaagatccttaaaacacggaaggattttgatcatgttgtattactcagtgggaagtggctctactcacatgtgcaaggaatttcttatccagggggtatgtgcctgccctattattccaccagtatcattaaggatcttttacctgacacaaacataattgcaaacagaatggcacatcaactggggcataaccttgggatgcagcatgacgagttcccatgcacctgtccttcaggaaaatgcgtgatggacagtgatggaagcattcctgcactgaaattcagtaaatgcagccaaaaccaataccaccagtacttgaaggattataagccaacatgcatgctcaacattccatttccttacaattttcatgatttccaattttgtggaaacaagaagttggatgagggtgaagagtgtgactgtggccctgctcaggagtgtactaatccttgctgtgatgcacacacatgtgtactgaagccaggatttacttgtgcagaaggagaatgctgtgaatcttgtcagataaaaaaagcagggtccatatgcagaccggcgaaagatgaatgtgattttcctgagatgtgcactggccactcgcctgcctgtcctaaggaccagttcagggtcaatggatttccttgcaagaactcagaaggctactgtttcatggggaaatgtccaactcgtgaggatcagtgctctgaactatttgatgatgaggcaatagagagtcatgatatctgctacaagatgaatacaaaaggaaataaatttggatactgcaaaaacaaggaaaacagatttcttccctgtgaggagaaggatgtcagatgtggaaagatctactgcactggaggggagctttcctctctccttggagaagacaagacttatcaccttaaggatccccagaagaatgctactgtcaaatgcaaaactatttttttataccatgattctacagacattggcctggtggcgtcaggaacaaaatgtggagagggaatggtatgcaacaatggtgaatgtctaaacatggaaaaggtctatatctcaaccaattgcccctctcagtgcaatgaaaatcctgtagatggccacggactccagtgccactgtgaggaaggacaggcacctgtagcctgtgaagaaaccttacatgttaccagtatcaccatcttggttgttgtgcttgtcctggttattgtcggtatcggagttcttatactattagttcgttaccgaaaatgtatcaagttgaagcaagttcagagcccacctacagaaaccctgggagtggagaacaaaggatactttggtgatgagcagcagataaggactgagccaatcctgccagaaattcatttcctaaataaacctgcaagtaaagattcaagaggaatcgcagatcccaatcaaagtgccaagtggtag

SEQ ID NO: 296 - protein, 756 aa, Homo sapiens
MLPGCIFLMILLIPQVKEKFILGVEGQQLVRPKKLPLIQKRDTGHTHDDDIKTYEEELLYEIKLNRKTLVLHLLRSRREFLGSNYSETFYSMKGEAFTRHPQIMDHCFYQGSIVHEYDSAASISTCNGLRGFFRINDQRYLIEPVKYSDEGEHLVFKYNLRVPYGANYSCTELNFTRKTVPGDNESEEDSKIKQGIHDEKYVELFIVADDTVYRRNGHPHNKLRNRIWGMVNFVNMIYKTLNIHVTLVGIEIWTHEDKIELYSNIETTLLRFSFWQEKILKTRKDFDHVVLLSGKWLYSHVQGISYPGGMCLPYYSTSIIKDLLPDTNIIANRMAHQLGHNLGMQHDEFPCTCPSGKCVMDSDGSIPALKFSKCSQNQYHQYLKDYKPTCMLNIPFPYNFHDFQFCGNKKLDEGEECDCGPAQECTNPCCDAHTCVLKPGFTCAEGECCESCQIKKAGSICRPAKDECDFPEMCTGHSPACPKDQFRVNGFPCKNSEGYCFMGKCPTREDQCSELFDDEAIESHDICYKMNTKGNKFGYCKNKENRFLPCEEKDVRCGKIYCTGGELSSLLGEDKTYHLKDPQKNATVKCKTIFLYHDSTDIGLVASGTKCGEGMVCNNGECLNMEKVYISTNCPSQCNENPVDGHGLQCHCEEGQAPVACEETLHVTSITILVVVLVLVIVGIGVLILLVRYRKCIKLKQVQSPPTETLGVENKGYFGDEQQIRTEPILPEIHFLNKPASKDSRGIADPNQSAKW

SEQ ID NO: 297 - DNA, 2283 bp, Homo sapiens
  CDS (12)..(2273)
aatcactcagaatgcttcccgggtgtatattcttgatgattttactcattcctcaggttaaagaaaagttcatccttggagtagagggtcaacaactggttcgtcctaaaaagcttcctctgatacagaagcgagatactggacacacccatgatgatgacatactgaaaacgtatgaagaagaattgttgtatgaaataaaactaaatagaaaaaccttagtccttcatcttctaagatccagggagttcctaggctcaaattacagtgaaacattctactccatgaaaggaggagcgttcaccaggcatcctcagatcatggatcattgtttttaccaaggatccatagtacacgaatatgattcagctgccagtatcagtacgtgtaatggtctaaggggattcttcagaataaacgaccaaagatacctcattgaaccagtgaaatactcagatgagggagaacatttggtgttcaaatataacctgagggtgccgtatggtgccaattattcctgtacagagcttaattttaccagaaaaactgttccaggggataatgaatctgaagaagactccaaaataaaaggcatccatgatgaaaagtatgttgaattgttcattgttgctgatgatactgtgtatcgcagaaatggtcatcctcacaataaactaaggaaccgaatttggggaatggtcaattttgtcaacatgatttataaaaccttaaacatccatgtgacgttggttggcattgaaatatggacacatgaagataaaatagaactatattcaaatatagaaactaccttattgcgtttttcattttggcaagaaaagatccttaaaacacggaaggattttgatcatgttgtattactcagtgggaagtggctctactcacatgtgcaaggaatttcttatccagggggtatgtgcctgccctattattccaccagtatcattaaggatcttttacctgacacaaacataattgcaaacagaatggcacatcaactggggcataaccttgggatgcagcatgacgagttcccatgcacctgtccttcaggaaaatgcgtgatggacagtgatggaagcattcctgcactgaaattcagtaaatgcagccaaaaccaataccaccagtacttgaaggattataagccaacatgcatgctcaacattccatttccttacaattttcatgatttccaattttgtggaaacaagaagttggatgagggtgaagagtgtgactgtggccctgctcaggagtgtactaatccttgctgtgatgcacacacatgtgtactgaagccaggatttacttgtgcagaaggagaatgctgtgaatcttgtcagataaaaaaagcagggtccatatgcagaccggcgaaagatgaatgtgattttcctgagatgtgcactggccactcgcctgcctgtcctaaggaccagttcagggtcaatggatttccttgcaagaactcagaaggctactgtttcatggggaaatgtccaactcgtgaggatcagtgctctgaactatttgatgatgatgcaatagagagtcatgatatctgctacaagatgaatacaaaaggaaataaatttggatactgcaaaaacaaggaaaacagatttcttccctgtgaggagaaagatgtcagatgtggaaagatctactgcactggaggggagctttcctctctccttggagaagacaagacttatcaccttaaggatccccagaagaatgctactgtcaaatgcaaaactatttttttataccatgattctacagacattggcctggtggcgtcaggaacaaaatgtggagagggaatggtgtgcaacaatggtgaatgtctaaacatggaaaaggtctatatctcaaccaattgcccctctcagtgcaatgaaaatcctgtggatggccacggactccagtgccactgtgaggaaggacaggcacctgtagcctgtgaagaaaccttacatgttaccaatatcaccatcttggttgttgtgcttgtcctggttattgtcggtatcggagttcttatactattagttcgttaccgaaaatgtatcaagttgaagcaagttcagagcccacctacagaaaccctgggagtggagaacaaaggatactttggtgatgagcagcagataaggactgagccaatcctgccggaaattcatttcctaaataaacctgcaagtaaagattcaagaggaatcgcagatcccaatcaaagtgccaagtgagcttgaa

SEQ ID NO: 298 - protein, 754 aa, Homo sapiens [sequence omitted]

SEQ ID NO: 299 - DNA, 2464 bp, Homo sapiens
  CDS (4)..(2247)
agaatgcttcccgggtgtatattcttgatgattttactcattcctcaggttaaagaaaagttcatccttggagtagagggtcaacaactggttcgtcctaaaaagcttcctctgatacagaagcgagatactggacacacccatgatgatgacatactgaaaacgtatgaagaagaattgttgtatgaaataaaactaaatagaaaaaccttagtccttcatcttctaagatccagggagttcctaggctcaaattacagtgaaacattctactccatgaaaggagaagcgttcaccaggcatcctcagatcatggatcattgtttttaccaaggatccatagtacacgaatatgattcagctgccagtatcagtacgtgtaatggtctaaggggattcttcagaataaacgaccaaagatacctcattgaaccagtgaaatactcagatgagggagaacatttggtgttcaaatataacctgagggtgccgtatggtgccaattattcctgtacagagcttaattttaccagaaaaactgttccaggggataatgaatctgaagaagactccaaaataaaaggcatccatgatgaaaagtatgttgaattgttcattgttgctgatgatactgtgtatcgcagaaatggtcatcctcacaataaactaaggaaccgaatttggggaatggtcaattttgtcaacatgatttataaaaccttaaacatccatgtgacgttggttggcattgaaatatggacacatgaagataaaatagaactatattcaaatatagaaactaccttattgcgtttttcattttggcaagaaaagatccttaaaacacggaaggattttgatcatgttgtattactcagtgggaagtggctctactcacatgtgcaaggaatttcttatccagggggtatgtgcctgccctattattccaccagtatcattaaggatcttttacctgacacaaacataattgcaaacagaatggcacatcaactggggcataaccttgggatgcagcatgacgagttcccatgcacctgtccttcaggaaaatgcgtgatggacagtgatggaagcattcctgcactgaaattcagtaaatgcagccaaaaccaataccaccagtacttgaaggattataagccaacatgcatgctcaacattccatttccttacaattttcatgatttccaattttgtggaaacaagaagttggatgagggtgaagagtgtgactgtggccctgctcaggagtgtactaatccttgctgtgatgcacacacatgtgtactgaagccaggatttacttgtgcagaaggagaatgctgtgaatcttgtcagataaaaaaagcagggtccatatgcagaccggcgaaagatgaatgtgattttcctgagatgtgcactggccactcgcctgcctgtcctaaggaccagttcagggtcaatggatttccttgcaagaactcagaaggctactgtttcatggggaaatgtccaactcgtgaggatcagtgctctgaactatttgatgatgaggcaatagagagtcatgatatctgctacaagatgaatacaaaaggaaataaatttggatactgcaaaaacaaggaaaacagatttcttccctgtgaggagaaagatgtcagatgtggaaagacctactgcactggaggggagctttcctctctccttggagaagacaagacttatcaccttaaggatccccagaagaatgctactgtcaaatgcaaaactatttttttataccatgattctacagacattggcctggtggcgtcaggaacaaaatgtggagagggaatggtggatggccacggactccagtgccactgtgaggaaggacaggcacctgtagcctgtgaagaaaccttacatgttaccaatatcaccatcttggttgttgtgcttgtcctggttattgtcggtatcggagttcttatactattagttcgttaccgaaaatgtatcaagttgaagcaagttcagagcccacctacagaaaccctgggagtggagaacaaaggatactttggtgatgagcagcagataaggactgagccaatcctgccagaaattcatttcctaaatagaactccagaatccttggaaagcctgcccactagtttttcaagtccccactacatcacactgaaacctgcaagtaaagattcaagaggaatcgcagatcccaatcaaagtgccaagtgagcttgaagttggatatccaaaatggccgtgcaagcttaggctggggattctggatgcaacgtctttacaaccttacctagatatctgctactcacatttttggtagtgtttcaaacgttctttatccagacagacaatgtttaagagaaacaacttatttctgttaatatttaccggtagaattcacaccctctatcataaacatatgctgcag

SEQ ID NO: 300 - protein, 748 aa, Homo sapiens
MLPGCIFLMILLIPQVKEKFILGVEGQQLVRPKKLPLIQKRDTGHTHDDDILKTYEEELLYEIKLNRKTLVLHLLRSREFLGSNYSETFYSMKGEAFTRHPQIMDHCFYQGSIVHEYDSAASISTCNGLRGFFRINDQRYLIEPVKYSDEGEHLVFKYNLRVPYGANYSCTELNFTRKTVPGDNESEEDSKIKGIHDEKYVELFIVADDTVYRRNGHPHNKLRNRIWGMVNFVNMIYKTLNIHVTLVGIEIWTHEDKIELYSNIETTLLRFSFWQEKILKTRKDFDHVVLLSGKWLYSHVQGISYPGGMCLPYYSTSIIKDLLPDTNIIANRMAHQLGHNLGMQHDEFPCTCPSGKCVMDSDGSIPALKFSKCSQNQYHQYLKDYKPTCMLNIPFPYNFHDFQFCGNKKLDEGEECDCGPAQECTNPCCDAHTCVLKPGFTCAEGECCESCQIKKAGSICRPAKDECDFPEMCTGHSPACPKDQFRVNGFPCKNSEGYCFMGKCPTREDQCSELFDDEAIESHDICYKMNTKGNKFGYCKNKENRFLPCEEKDVRCGKTYCTGGELSSLLGEDKTYHLKDPQKNATVKCKTIFLYHDSTDIGLVASGTKCGEGMVDGHGLQCHCEEGQAPVACEETLHVTNITILVVVLVLVIVGIGVLILLVRYRKCIKLKQVQSPPTETLGVENKGYFGDEQQIRTEPILPEIHFLNRTPESLESLPTSFSSPHYITLKPASKDSRGIADPNQSAK

SEQ ID NO: 301 - DNA, 2268 bp, Homo sapiens
  CDS (1)..(2265)
atgcttcccgggtgtatattcttgatgattttactcattcctcaggttaaagaaaagttcatccttggagtagagggtcaacaactggttcgtcctaaaaagcttcctctgatacagaggcgagatactggacacacccatgatgatgacatactgaaaacgtatgaagaagaattgttgtatgaaataaaactaaatagaaaaaccttagtccttcatcttctaagatccagggagttcctaggctcaaattacagtgaaacattctactccatgaaaggagaagcgttcaccaggcatcctcagatcatggaacactgttactataaaggaaacatcctaaatgaaaagaattctgttgccagcatcagtacttgtgacgggttgaggggattcttcagaataaacgaccaaagatacctcattgaaccagtgaaatactcagatgagggagaacatttggtgttcaaatataacctgagggtgccgtatggtgccaattattcctgtacagagcttaattttaccagaaaaactgttccaggggataatgaatctgaagaagactccaaaataaaaggcatccatgatgaaaagtatgttgaattgttcattgttgctgatgatactgtgtatcgcagaaatggtcatcctcacaataaactaaggaaccgaatttggggaatggtcaattttgtcaacatgatttataaaaccttaaacatccatgtgacgttggttggcattgaaatatggacacatgaagataaaatagaactatattcaaatatagaaactaccttattgcgtttttcattttggcaagaaaagatccttaaaacacggaaggattttgatcatgttgtattactcagtgggaagtggctctactcacatgtgcaaggaatttcttatccagggggtatgtgcctgccctattattccaccagtatcattaaggatcttttacctgacacaaacataattgcaaacagaatggcacatcaactggggcataaccttgggatgcagcatgacgagttcccatgcacctgtccttcaggaaaatgcgtgatggacagtgatggaagcattcctgcactgaaattcagtaaatgcagccaaaaccaataccaccagtacttgaaggattataagccaacatgcatgctcaacattccatttccttacaattttcatgatttccaattttgtggaaacaagaagttggatgagggtgaagagtgtgactgtggccctgctcaggagtgtactaatccttgctgtgatgcacacacatgtgtactgaagccaggatttacttgtgcagaaggagaatgctgtgaatcttgtcagataaaaaaagcagggtccatatgcagaccggcgaaagatgaatgtgattttcctgagatgtgcactggccactcgcctgcctgtcctaaggaccagttcagggtcaatggatttccttgcaagaactcagaaggctactgtttcatggggaaatgtccaactcgtgaggatcagtgctctgaactatttgatgatgaggcaatagagagtcatgatatctgctacaagatgaatacaaaaggaaataaatttggatactgcaaaaacaaggaaaacagatttcttccctgtgaggagaaggatgtcagatgtggaaagatctactgcactggaggggagctttcctctctccttggagaagacaagacttatcaccttaaggatccccagaagaatgctactgtcaaatgcaaaactatttttttataccatgattctacagacattggcctggtggcgtcaggaacaaaatgtggagagggaatggtatgcaacaatggtgaatgtctaaacatggaaaaggtctatatctcaaccaattgcccctctcagtgcaatgaaaatcctgtagatggccacggactccagtgccactgtgaggaaggacaggcacctgtagcctgtgaagaaaccttacatgttaccagtatcaccatcttggttgttgtgcttgtcctggttattgtcggtatcggagttcttatactattagttcgttaccgaaaatgtatcaagttgaagcaagttcagagcccacctacagaaaccctgggagtggagaacaaaggatactttggtgatgagcagcagataaggactgagccaatcctgccagaaattcatttcctaaataaacctgcaagtaaagattcaagaggaatcgcagatcccaatcaaagtgccaagtggtag

SEQ ID NO: 302 - protein, 755 aa, Homo sapiens
MLPGCIFLMILLIPQVKEKFILGVEGQQLVRPKKLPLIQRRDTGHTHDDDILKTYEEELLYEIKLNRKTLVLHLLRSREFLGSNYSETFYSMKGEAFTRHPQIMEHCYYKGNILNEKNSVASISTCDGLRGFFRINDQRYLIEPVKYSDEGEHLVFKYNLRVPYGANYSCTELNFTRKTVPGDNESEEDSKIKGIHDEKYVELFIVADDTVYRRNGHPHNKLRNRIWGMVNFVNMIYKTLNIHVTLVGIEIWTHEDKIELYSNIETTLLRFSFWQEKILKTRKDFDHVVLLSGKWLYSHVQGISYPGGMCLPYYSTSIIKDLLPDTNIIANRMAHQLGHNLGMQHDEFPCTCPSGKCVMDSDGSIPALKFSKCSQNQYHQYLKDYKPTCMLNIPFPYNFHDFQFCGNKKLDEGEECDCGPAQECTNPCCDAHTCVLKPGFTCAEGECCESCQIKKAGSICRPAKDECDFPEMCTGHSPACPKDQFRVNGFPCKNSEGYCFMGKCPTREDQCSELFDDEAIESHDICYKMNTKGNKFGYCKNKENRFLPCEEKDVRCGKIYCTGGELSSLLGEDKTYHLKDPQKNATVKCKTIFLYHDSTDIGLVASGTKCGEGMVCNNGECLNMEKVYISTNCPSQCNENPVDGHGLQCHCEEGQAPVACEETLHVTSITILVVVLVLVIVGIGVLILLVRYRKCIKLKQVQSPPTETLGVENKGYFGDEQQIRTEPILPEIHFLNKPASKDSRGIADPNQSAKW

SEQ ID NO: 303 - DNA, 2268 bp, Homo sapiens
  CDS (1)..(2265)
atgcttcccgggtgtatattcttgatgattttactcattcctcaggttaaagaaaagttcatccttggagtagagggtcaacaactggttcgtcctaaaaagcttcctctgatacagaagcgaggtactggacacacccatgatgatgacatactgaaaacgtatgaagaagaattgttgtatgaaataaaactaaatagaaaaaccttagtccttcatcttctaagatccagggagttcctaggctcaaattacagtgaaacattctactccatgaaaggagaagcgttcaccaggcatcctcagatcatggaacactgttactataaaggaaacatcctaaatgaaaagaattctgttgccagcatcagtacttgtgacgggttgaggggattcttcagaataaacgaccaaagatacctcattgaaccagtgaaatactcagatgagggagaacatttggtgttcaaatataacctgagggtgccgtatggtgccaattattcctgtacagagcttaattttaccagaaaaactgttccaggggataatgaatctgaagaagactccaaaataaaaggcatccatgatgaaaagtatgttgaattgttcattgttgctgatgatactgtgtatcgcagaaatggtcatcctcacaataaactaaggaaccgaatttggggaatggtcaattttgtcaacatgatttataaaaccttaaacatccatgtgacgttggttggcattgaaatatggacacatgaagataaaatagaactatattcaaatatagaaactaccttattgcgtttttcattttggcaagaaaagatccttaaaacacggaaggattttgatcatgttgtattactcagtgggaagtggctctactcacatgtgcaaggaatttcttatccagggggtatgtgcctgccctattattccaccagtatcattaaggatcttttacctgacacaaacataattgcaaacagaatggcacatcaactggggcataaccttgggatgcagcatgacgagttcccatgcacctgtccttcaggaaaatgcgtgatggacagtgatggaagcattcctgcactgaaattcagtaaatgcagccaaaaccaataccaccagtacttgaaggattataagccaacatgcatgctcaacattccatttccttacaattttcatgatttccaattttgtggaaacaagaagttggatgagggtgaagagtgtgactgtggccctgctcaggagtgtactaatccttgctgtgatgcacacacatgtgtactgaagccaggatttacttgtgcagaaggagaatgctgtgaatcttgtcagataaaaaaagcagggtccatatgcagaccggcgaaagatgaatgtgattttcctgagatgtgcactggccactcgcctgcctgtcctaaggaccagttcagggtcaatggatttccttgcaagaactcagaaggctactgtttcatggggaaatgtccaactcgtgaggatcagtgctctgaactatttgatgatgaggcaatagagagtcatgatatctgctacaagatgaatacaaaaggaaataaatttggatactgcaaaaacaaggaaaacagatttcttccctgtgaggagaaggatgtcagatgtggaaagatctactgcactggaggggagctttcctctctccttggagaagacaagacttatcaccttaaggatccccagaagaatgctactgtcaaatgcaaaactatttttttataccatgattctacagacattggcctggtggcgtcaggaacaaaatgtggagagggaatggtatgcaacaatggtgaatgtctaaacatggaaaaggtctatatctcaaccaattgcccctctcagtgcaatgaaaatcctgtagatggccacggactccagtgccactgtgaggaaggacaggcacctgtagcctgtgaagaaaccttacatgttaccagtatcaccatcttggttgttgtgcttgtcctggttattgtcggtatcggagttcttatactattagttcgttaccgaaaatgtatcaagttgaagcaagttcagagcccacctacagaaaccctgggagtggagaacaaaggatactttggtgatgagcagcagataaggactgagccaatcctgccagaaattcatttcctaaataaacctgcaagtaaagattcaagaggaatcgcagatcccaatcaaagtgccaagtggtag

SEQ ID NO: 304 - protein, 755 aa, Homo sapiens
MLPGCIFLMILLIPQVKEKFILGVEGQQLVRPKKLPLIQKRGTGHTHDDDILKTYEEELLYEIKLNRKTLVLHLLRSREFLGSNYSETFYSMKGEAFTRHPQIMEHCYYKGNILNEKNSVASISTCDGLRGFFRINDQRYLIEPVKYSDEGEHLVFKYNLRVPYGANYSCTELNFTRKTVPGDNESEEDSKIKGIHDEKYVELFIVADDTVYRRNGHPHNKLRNRIWGMVNFVNMIYKTLNIHVTLVGIEIWTHEDKIELYSNIETTLLRFSFWQEKILKTRKDFDHVVLLSGKWLYSHVQGISYPGGMCLPYYSTSIIKDLLPDTNIIANRMAHQLGHNLGMQHDEFPCTCPSGKCVMDSDGSIPALKFSKCSQNQYHQYLKDYKPTCMLNIPFPYNFHDFQFCGNKKLDEGEECDCGPAQECTNPCCDAHTCVLKPGFTCAEGECCESCQIKKAGSICRPAKDECDFPEMCTGHSPACPKDQFRVNGFPCKNSEGYCFMGKCPTREDQCSELFDDEAIESHDICYKMNTKGNKFGYCKNKENRFLPCEEKDVRCGKIYCTGGELSSLLGEDKTYHLKDPQKNATVKCKTIFLYHDSTDIGLVASGTKCGEGMVCNNGECLNMEKVYISTNCPSQCNENPVDGHGLQCHCEEGQAPVACEETLHVTSITILVVVLVLVIVGIGVLILLVRYRKCIKLKQVQSPPTETLGVENKGYFGDEQQIRTEPILPEIHFLNKPASKDSRGIADPNQSAKW

SEQ ID NO: 305 - DNA, 994 bp, Homo sapiens
  CDS (27)..(968)
tgcagctaaagtgcattgtgtaaaacatgggggatgtgaatcagtcggtggcctcagacttcattctggtgggcctcttcagtcactcaggatcacgccagctcctcttctccctggtggctgtcatgtttgtcataggccttctgggcaacaccgttcttctcttcttgatccgtgtggactcccggctccatacacccatgtacttcctgctcagccagctctccctgtttgacattggctgtcccatggtcaccatccccaagatggcatcagactttctgcggggagaaggtgccacctcctatggaggtggtgcagctcaaatattcttcctcacactgatgggtgtggctgagggcgtcctgttggtcctcatgtcttatgaccgttatgttgctgtgtgccagcccctgcagtatcctgtacttatgagacgccaggtatgtctgctgatgatgggctcctcctgggtggtaggtgtgctcaacgcctccatccagacctccatcaccctgcattttccctactgtgcctcccgtattgtggatcacttcttctgtgaggtgccagccctactgaagctctcctgtgcagatacctgtgcctacgagatggcgctgtccacctcaggggtgctgatcctaatgctccctctttccctcatcgccacctcctacggccacgtgttgcaggctgttctaagcatgcgctcagaggaggccagacacaaggctgtcaccacctgctcctcgcacatcacggtagtggggctcttttatggtgccgccgtgttcatgtacatggtgccttgcgcctaccacagtccacagcaggataacgtggtttccctcttctatagccttgtcacccctacactcaacccccttatctacagtctgaggaatccggaggtgtggatggctttggtcaaagtgcttagcagagctggactcaggcaaatgtgctgactacatagaaactgctggtgaga

SEQ ID NO: 306 - protein, 314 aa, Homo sapiens
MGDVNQSVASDFILVGLFSHSGSRQLLFSLVAVMFVIGLLGNTVLLFLIRVDSRLHTPMYFLLSQLSLFDIGCPMVTIPKMASDFLRGEGATSYGGGAAQIFFLTLMGVAEGVLLVLMSYDRYVAVCQPLQYPVLMRRQVCLLMMGSSWVVGVLNASIQTSITLHFPYCASRIVDHFFCEVPALLKLSCADTCAYEMALSTSGVLILMLPLSLIATSYGHVLQAVLSMRSEEARHKAVTTCSSHITVVGLFYGAAVFMYMVPCAYHSPQQDNVVSLFYSLVTPTLNPLIYSLRNPEVWMALVKVLSRAGLRQMC

SEQ ID NO: 307 - DNA, 994 bp, Homo sapiens; identical to SEQ ID NO: 305
  CDS (27)..(968)

SEQ ID NO: 308 - protein, 314 aa, Homo sapiens; identical to SEQ ID NO: 306

SEQ ID NO: 309 - DNA, 977 bp, Homo sapiens
  CDS (16)..(957)
tgcattgtgtaaaacatgggggatgtgaatcagtcggtggcctcagacttcattctggtgggcctcttcagtcactcaggatcacgccagctcctcttctccctggtggctgtcatgtttgtcataggccttctgggcaacaccgttcttctcttcttgatccgtgtggactcccggctccatacacccatgtacttcctgctcagccagctctccctgtttgacattggctgtcccatggtcaccatccccaagatggcatcagactttctgcggggagaaggtgccacctcctatggaggtggtgcagctcaaatattcttcctcacactgatgggtgtggctgagggcgtcctgttggtcctcatgtcttatgaccgttatgttgctgtgtgccagcccctgcagtatcctgtacttatgagacgccaggtatgtctgctgatgatgggctcctcctgggtggtaggtgtgctcaacgcctccatccagacctccatcaccctgcattttccctactgtgcctcccgtattgtggatcacttcttctgtgaggtgccagccctactgaagctctcctgtgcagatacctgtgcctacgagatggcgctgtccacctcaggggtgctgatcctaatgctccctctttccctcatcgccacctcctacggccacgtgttgcaggctgttctaagcatgcgctcagaggaggccagacacaaggctgtcaccacctgctcctcgcacatcacggtagtggggctcttttatggtgccgccgtgttcatgtacatggtgccttgcgcctaccacagtccacagcaggataacgtggtttccctcttctatagccttgtcacccctacactcaacccccttatctacagtctgaggaatccggaggtgtggatggctttggtcaaagtgcttagcagagctggactcaggcaaatgtgctgactacatagaaactgctg

SEQ ID NO: 310 - protein, 314 aa, Homo sapiens; identical to SEQ ID NO: 306

SEQ ID NO: 311 - DNA, 1008 bp, Homo sapiens
  CDS (27)..(998)
agctggagatctggaacttccacagcatggagctctggaactaccacagcatggagctctggaacttcaccttgggaagtggcttcattttggtggggattctgaatgacagtgggtctcctgaactgctctgtgctacaattacaatcctatacttgttggccctgatcagcaatggcctactgctcctggctatcaccatggaagcccggctccacatgcccatgtacctcctgcttgggcagctctctctcatggacctcctgttcacatctgttgtcactcccaaggcccttgcggactttctgcgcagagaaaacaccatctcctttggaggctgtgcccttcagatgttcctggcactgacaatgggtggtgctgaggacctcctactggccttcatggcctatgacaggtatgtggccatttgtcatcctctgacatacatgaccctcatgagctcaagagcctgctggctcatggtggccacgtcctggatcctggcatccctaagtgccctaatatataccgtgtataccatgcactatcccttctgcagggcccaggagatcaggcatcttctctgtgagatcccacacttgctgaagttggcctgtgctgatacctccagatatgagctcatggtatatgtgatgggtgtgaccttcctgattccctctcttgctgctatactggcctcctatacacaaattctactcactgtgctccatatgccatcaaatgaggggaggaagaaagcccttgtcacctgctcttcccacctgactgtggttgggatgttctatggagctgccacattcatgtatgtcttgcccagttccttccacagcaccagacaagacaacatcatctctgttttctacacaattgtcactccagccctgaatccactcatctacagcctgaggaataaggaggtcatgcgggccttgaggagggtcctgggaaaatacatgctgccagcacactccacgctctagggaagga

SEQ ID NO: 312 - protein, 324 aa, Homo sapiens
MELWNYHSMELWNFTLGSGFILVGILNDSGSPELLCATITILYLLALISNGLLLLAITMEARLHMPMYLLLGQLSLMDLLFTSVVTPKALADFLRRENTISFGGCALQMFLALTMGGAEDLLLAFMAYDRYVAICHPLTYMTLMSSRACWLMVATSWILASLSALIYTVYTMHYPFCRAQEIRHLLCEIPHLLKLACADTSRYELMVYVMGVTFLIPSLAAILASYTQILLTVLHMPSNEGRKKALVTCSSHLTVVGMFYGAATFMYVLPSSFHSTRQDNIISVFYTIVTPALNPLIYSLRNKEVMRALRRVLGKYMLPAHSTL

SEQ ID NO: 313 - DNA, 1050 bp, Homo sapiens
  CDS (72)..(1019)
aaactagagttcatcttagcaaaaattcatgaagtatccatcttgttctaggtgatgaaagaaaccacagcatggagctctggaacttcaccttgggaagtggcttcattttggtggggattctgaatgacagtgggtctcctgaactgctctgtgctacaattacaatcctatacttgttggccctgatcagcaatggcctactgctcctggctatcaccatggaagcccggctccacatgcccatgtacctcctgcttgggcagctctctctcatggacctcctgttcacatctgttgtcactcccaaggcccttgcggactttctgcgcagagaaaacaccatctcctttggaggctgtgcccttcagatgttcctggcactgacaatgggtggtgctgaggacctcctactggccttcatggcctatgacaggtatgtggccatttgtcatcctctgacatacatgaccctcatgagctcaagagcctgctggctcatggtggccacgtcctggatcctggcatccctaagtgccctaatatataccgtgtataccatgcactatcccttctgcagggcccaggagatcaggcatcttctctgtgagatcccacacttgctgaaggtggcctgtgctgatacctccagatatgagctcatggtatatgtgatgggtgtgaccttcctgattccctctcttgctgctatactggcctcctatacacaaattctactcactgtgctccatatgccatcaaatgaggggaggaagaaagcccttgtcacctgctcttcccacctgactgtggttgggatgttctatggagctgccacattcatgtatgtcttgcccagttccttccacagcaccagacaagacaacatcatctctgttttctacacaattgtcactccagccctgaatccactcatctacagcctgaggaataaggaggtcatgcgggccttgaggagggtcctgggaaaatacatgctgccagcacactccacgctctagggaaggatcatggctagcttccagaatt

SEQ ID NO: 314 - protein, 316 aa, Homo sapiens
MELWNFTLGSGFILVGILNDSGSPELLCATITILYLLALISNGLLLLAITMEARLHMPMYLLLGQLSLMDLLFTSVVTPKALADFLRRENTISFGGCALQMFLALTMGGAEDLLLAFMAYDRYVAICHPLTYMTLMSSRACWLMVATSWILASLSALIYTVYTMHYPFCRAQEIRHLLCEIPHLLKVACADTSRYELMVYVMGVTFLIPSLAAILASYTQILLTVLHMPSNEGRKKALVTCSSHLTVVGMFYGAATFMYVLPSSFHSTRQDNIISVFYTIVTPALNPLIYSLRNKEVMRALRRVLGKYMLPAHSTL

SEQ ID NO: 315 - DNA, 1010 bp, Homo sapiens
  CDS (4)..(999)
tagctggagatctggaacttccacagcatggagctctggaactaccacagcatggagctctggaacttcaccttgggaagtggcttcattttggtggggattctgaatgacagtgggtctcctgaactgctctgtgctacaattacaatcctatacttgttggccctgatcagcaatggcctactgctcctggctatcaccatggaagcccggctccacatgcccatgtacctcctgcttgggcagctctctctcatggacctcctgttcacatctgttgtcactcccaaggcccttgcggactttctgcgcagagaaaacaccatctcctttggaggctgtgcccttcagatgttcctggcactgacaatgggtggtgctgaggacctcctactggccttcatggcctatgacaggtatgtggccatttgtcatcctctgacatacatgaccctcatgagctcaagagcctgctggctcatggtggccacgtcctggatcctggcatccctaagtgccctaatatataccgtgtataccatgcactatcccttctgcagggcccaggagatcaggcatcttctctgtgagatcccacacttgctgaagttggcctgtgctgatacctccagatatgagctcatggtatatgtgatgggtgtgaccttcctgattccctctcttgctgctatactggcctcctatacacaaattctactcactgtgctccatatgccatcaaatgaggggaggaagaaagcccttgtcacctgctcttcccacctgactgtggttgggatgttctatggagctgccacattcatgtatgtcttgcccagttccttccacagcaccagacaagacaacatcatctctgttttctacacaattgtcactccagccctgaatccactcatctacagcctgaggaataaggaggtcatgcgggccttgaggagggtcctgggaaaatacatgctgccagcacactccacgctctagggaaggaa

SEQ ID NO: 316 - protein, 332 aa, Homo sapiens
LEIWNFHSMELWNYHSMELWNFTLGSGFILVGILNDSGSPELLCATITILYLLALISNGLLLLAITMEARLHMPMYLLLGQLSLMDLLFTSVVTPKALADFLRRENTISFGGCALQMFLALTMGGAEDLLLAFMAYDRYVAICHPLTYMTLMSSRACWLMVATSWILASLSALIYTVYTMHYPFCRAQEIRHLLCEIPHLLKLACADTSRYELMVYVMGVTFLIPSLAAILASYTQILLTVLHMPSNEGRKKALVTCSSHLTVVGMFYGAATFMYVLPSSFHSTRQDNIISVFYTIVTPALNPLIYSLRNKEVMRALRRVLGKYMLPAHSTL

SEQ ID NO: 317 - DNA, 1008 bp, Homo sapiens
  CDS (27)..(998)
agctggagatctggaacttccacagcatggagctctggaactaccacagcatggagctctggaacttcaccttgggaagtggcttcattttggtggggattctgaatgacagtgggtctcctgaactgctctgtgctacaattacaatcctatacttgttggccctgatcagcaatggcctactgctcctggctatcaccatggaagcccggctccacatgcccatgtacctcctgcttgggcagctctctctcatggacctcctgttcacatctgttgtcactcccaaggcccttgcggactttctgcgcagagaaaacaccatctcctttggaggctgtgcccttcagatgttcctggcactgacaatgggtggtgctgaggacctcctactggccttcatggcctatgacaggtatgtggccatttatcatcctctgacatacatgaccctcatgagctcaagagcctgctggctcatggtggccacgtcctggatcctggcatccctaagtgccctaatatataccgtgtataccatgcactatcccttctgcagggcccaggagatcaggcatcttctctgtgagatcccacacttgctgaagttggcctgtgctgatacctccagatatgagctcatggtatatgtgatgggtgtgaccttcctgattccctctcttgctgctatactggcctcctatacacaaattctactcactgtgctccatatgccatcaaatgaggggaggaagaaagcccttgtcacctgctcttcccacctgactgtggttgggatgttctatggagctgccacattcatgtatgtcttgcccagttccttccacagcaccagacaagacaacatcatctctgttttctacacaattgtcactccagccctgaatccactcatctacagcctgaggaataaggaggtcatgcgggccttgaggagggtcctgggaaaatacatgctgccagcacactccacgctctagggaagga

SEQ ID NO: 318 - protein, 324 aa, Homo sapiens
MELWNYHSMELWNFTLGSGFILVGILNDSGSPELLCATITILYLLALISNGLLLLAITMEARLHMPMYLLLGQLSLMDLLFTSVVTPKALADFLRRENTISFGGCALQMFLALTMGGAEDLLLAFMAYDRYVAIYHPLTYMTLMSSRACWLMVATSWILASLSALIYTVYTMHYPFCRAQEIRHLLCEIPHLLKLACADTSRYELMVYVMGVTFLIPSLAAILASYTQILLTVLHMPSNEGRKKALVTCSSHLTVVGMFYGAATFMYVLPSSFHSTRQDNIISVFYTIVTPALNPLIYSLRNKEVMRALRRVLGKYMLPAHSTL

SEQ ID NO: 319 - DNA, 1008 bp, Homo sapiens
  CDS (27)..(998)
agctggagatctggaacttccacagcatggagctctggaactaccacagcatggagctctggaacttcaccttgggaagtggcttcattttggtggggattctgaatgacagtgggtctcctgaactgctctgtgctacaattacaatcctatacttgttggccctgatcagcaatggcctactgctcctggctatcaccatggaagcccggctccacatgcccatgtacctcctgcttgggcagctctctctcatggacctcctgttcacatctgttgtcactcccaaggcccttgcggactttctgcgcagagaaaacaccatctcctttggaggctgtgcccttcagatgttcctggcactgacaatgggtggtgctgaggacctcctactggccttcatggcctatgacaggtatgtggccatttgtcatcctctgaaatacatgaccctcatgagctcaagagcctgctggctcatggtggccacgtcctggatcctggcatccctaagtgccctaatatataccgtgtataccatgcactatcccttctgcagggcccaggagatcaggcatcttctctgtgagatcccacacttgctgaagttggcctgtgctgatacctccagatatgagctcatggtatatgtgatgggtgtgaccttcctgattccctctcttgctgctatactggcctcctatacacaaattctactcactgtgctccatatgccatcaaatgaggggaggaagaaagcccttgtcacctgctcttcccacctgactgtggttgggatgttctatggagctgccacattcatgtatgtcttgcccagttccttccacagcaccagacaagacaacatcatctctgttttctacacaattgtcactccagccctgaatccactcatctacagcctgaggaataaggaggtcatgcgggccttgaggagggtcctgggaaaatacatgctgccagcacactccacgctctagggaagga

SEQ ID NO: 320 - protein, 324 aa, Homo sapiens
MELWNYHSMELWNFTLGSGFILVGILNDSGSPELLCATITILYLLALISNGLLLLAITMEARLHMPMYLLLGQLSLMDLLFTSVVTPKALADFLRRENTISFGGCALQMFLALTMGGAEDLLLAFMAYDRYVAICHPLKYMTLMSSRACWLMVATSWILASLSALIYTVYTMHYPFCRAQEIRHLLCEIPHLLKLACADTSRYELMVYVMGVTFLIPSLAAILASYTQILLTVLHMPSNEGRKKALVTCSSHLTVVGMFYGAATFMYVLPSSFHSTRQDNIISVFYTIVTPALNPLIYSLRNKEVMRALRRVLGKYMLPAHSTL

SEQ ID NO: 321 - DNA, 1008 bp, Homo sapiens
  CDS (27)..(998)
agctggagatctggaacttccacagcatggagctctggaactaccacagcatggagctctggaacttcaccttgggaagtggcttcattttggtggggattctgaatgacagtgggtctcctgaactgctctgtgctacaattacaatcctatacttgttggccctgatcagcaatggcctactgctcctggctatcaccatggaagcccggctccacatgcccatgtacctcctgcttgggcagctctctctcatggacctcctgttcacatctgttgtcactcccaaggcccttgcggactttctgcgcagagaaaacaccatctcctttggaggctgtgcccttcagatgttcctggcactgacaatgggtggtgctgaggacctcctactggccttcatggcctatgacaggtatgtggccatttgtcatcctctgacatacatgaccctcatgagctcaagagcctgctggctcatggtggccacgtcctggatcctggcatccctaagtgccctaatatataccgtgtataccatgcactatcccttctgcagggcccaggagatcaggcatcttctctgtgagatcccacacttgctgaagttggcctgtgctgatacctccagatatgagctcatggtatatgtgatgggtgtgaccttcctgattccctctcttgctgctatactggcctcctatacacaaattctactcactgtgctccatatgccatcaaatgaggggaggaggaaagcccttgtcacctgctcttcccacctgactgtggttgggatgttctatggagctgccacattcatgtatgtcttgcccagttccttccacagcaccagacaagacaacatcatctctgttttctacacaattgtcactccagccctgaatccactcatctacagcctgaggaataaggaggtcatgcgggccttgaggagggtcctgggaaaatacatgctgccagcacactccacgctctagggaagga

SEQ ID NO: 322 - protein, 324 aa, Homo sapiens
MELWNYHSMELWNFTLGSGFILVGILNDSGSPELLCATITILYLLALISNGLLLLAITMEARLHMPMYLLLGQLSLMDLLFTSVVTPKALADFLRRENTISFGGCALQMFLALTMGGAEDLLLAFMAYDRYVAICHPLTYMTLMSSRACWLMVATSWILASLSALIYTVYTMHYPFCRAQEIRHLLCEIPHLLKLACADTSRYELMVYVMGVTFLIPSLAAILASYTQILLTVLHMPSNEGRRKALVTCSSHLTVVGMFYGAATFMYVLPSSFHSTRQDNIISVFYTIVTPALNPLIYSLRNKEVMRALRRVLGKYMLPAHSTL

SEQ ID NO: 323 - DNA, 1016 bp, Homo sapiens
  CDS (7)..(960)
taccagatgaatccagcaaatcattcccaggtggcaggatttgttctactggggctctctcaggtttgggagcttcggtttgttttcttcactgttttctctgctgtgtattttatgactgtagtgggaaaccttcttattgtggtcatagtgacctccgacccacacctgcacacaaccatgtattttctcttgggcaatctttctttcctggacttttgctactcttccatcacagcacctaggatgctggttgacttgctctcaggcaaccctaccatttcctttggtggatgcctgactcaactcttcttcttccacttcattggaggcatcaagatcttcctgctgactgtcatggcgtatgaccgctacattgccatttcccagcccctgcactacacgctcattatgaatcagactgtctgtgcactccttatggcagcctcctgggtggggggcttcatccactccatagtacagattgcattgactatccagctgccattctgtgggcctgacaagctggacaacttttattgtgatgtgcctcagctgatcaaattggcctgcacagatacctttgtcttagagcttttaatggtgtctaacaatggcctggtgaccctgatgtgttttctggtgcttctgggatcgtacacagcactgctagtcatgctccgaagccactcacgggagggccgcagcaaggccctgtctacctgtgcctctcacattgctgtggtgaccttaatctttgtgccttgcatctacgtctatacaaggccttttcggacattccccatggacaaggccgtctctgtgctatacacaattgtcacccccatgctgaatcctgccatctataccctgagaaacaaggaagtgatcatggccatgaagaagctgtggaggaggaaaaaggaccctattggtcccctggagcacagacccttacattagcagaggcagtgacctgagaatctgaaagatgctacagggtattagcagaggca

SEQ ID NO: 324 - protein, 318 aa, Homo sapiens
MNPANHSQVAGFVLLGLSQVWELRFVFFTVFSAVYFMTVVGNLLIVVIVTSDPHLHTTMYFLLGNLSFLDFCYSSITAPRMLVDLLSGNPTISFGGCLTQLFFFHFIGGIKIFLLTVMAYDRYIAISQPLHYTLIMNQTVCALLMAASWVGGFIHSIVQIALTIQLPFCGPDKLDNFYCDVPQLIKLACTDTFVLELLMVSNNGLVTLMCFLVLLGSYTALLVMLRSHSREGRSKALSTCASHIAVVTLIFVPCIYVYTRPFRTFPMDKAVSVLYTIVTPMLNPAIYTLRNKEVIMAMKKLWRRKKDPIGPLEHRPLH

SEQ ID NO: 325 - DNA, 1077 bp, Homo sapiens
  CDS (31)..(984)
caggttcattgacaaggtcataccaaccagatgaatccagcaaatcattcccaggtggcaggatttgttctactggggctctctcaggtttgggagcttcggtttgttttcttcactgttttctctgctgtgtattttatgactgtagtgggaaaccttcttattgtggtcatagtgacctccgacccacacctgcacacaaccatgtattttctcttgggcaatctttctttcctggacttttgctactcttccatcacagcacctaggatgctggttgacttgctctcaggcaaccctaccatttcctttggtggatgcctgactcaactcttcttcttccacttcattggaggcatcaagatcttcctgctgactgtcatggcgtatgaccgctacattgccatttcccagcccctgcactacacgctcattatgaatcagactgtctgtgcactccttatggcagcctcctgggtggggggcttcatccactccatagtacagattgcattgactatccagctgccattctgtgggcctgacaagctggacaacttttattgtgatgtgcctcagctgatcaaattggcctgcacagatacctttgtcttagagcttttaatggtgtctaacaatggcctggtgaccctgatgtgttttctggtgcttctgggatcgtacacagcactgctagtcatgctccgaagccactcacgggagggccgcagcaaggccctgtctacctgtgcctctcacattgctgtggtgaccttaatctttgtgccttgcatctacgtctatacaaggccttttcggacattccccatggacaaggccgtctctgtgctatacacaattgtcacccccatgctgaatcctgccatctataccctgagaaacaaggaagtgatcatggccatgaagaagctgtggaggaggaaaaaggaccctattggtcccctggagcacagacccttacattagcagaggcagtgacctgagaatctgaaagatgctacagggtattagcagaggcagtgacctgagaatctgaaagatgctacagggtattag

SEQ ID NO: 326 - protein, 318 aa, Homo sapiens; identical to SEQ ID NO: 324

SEQ ID NO: 327 - DNA, 1077 bp, Homo sapiens; identical to SEQ ID NO: 325
  CDS (31)..(984)

SEQ ID NO: 328 - protein, 318 aa, Homo sapiens; identical to SEQ ID NO: 324

SEQ ID NO: 329 - DNA, 1028 bp, Homo sapiens
  CDS (28)..(960)
agggagagagaccaagggtgagaagaaatgtccaacgccagcctactgacagcgttcatcctcatgggccttccccatgccccagcgctggacgcccccctctttggagtcttcctggtggtttacgtgctcactgtgctggggaacctcctcatcctgctggtgatcagggtggattctcacctccacaccaccatgtactacttcctcaccaacctgtcgttcattgacatgtggttctccactgtcacggtgcccaaattgctgatgactttggtgttcccaagtggcagggctatctccttccacagctgcatggctcagctctatttctttcacttcctagggggcaccgagtgtttcctctacagggtcatgtcctgtgatcgctacctggccatcagttacccgctcaggtacaccagcatgatgactgggcgctcgtgtactcttctggccaccagcacttggctcagtggctctctgcactctgctgtccaggccatattgactttccatttgccctactgtggacccaactggatccagcactatttgtgtgatgcaccgcccatcctgaaactggcctgtgcagacacctcagccatagagactgtcatttttgtgactgttggaatagtggcctcgggctgctttgtcctgatagtgctgtcctatgtgtccatcgtctgttccatcctgcggatccgcacctcagaggggaagcacagagcctttcagacctgtgcctcccactgtatcgtggtcctttgcttctttggccctggtcttttcatttacctgaggccaggctccaggaaagctgtggatggagttgtggccgttttctacactgtgctgacgccccttctcaaccctgttgtgtacaccctgaggaacaaggaggtgaagaaagctctgttgaagctgaaagacaaagtagcacattctcagagcaaatagacactagggaagattacatatcttagctcttgtgaatagtgctgtgaaaaacatacaggggcagg

SEQ ID NO: 330 - protein, 311 aa, Homo sapiens
MSNASLLTAFILMGLPHAPALDAPLFGVFLVVYVLTVLGNLLILLVIRVDSHLHTTMYYFLTNLSFIDMWFSTVTVPKLLMTLVFPSGRAISFHSCMAQLYFFHFLGGTECFLYRVMSCDRYLAISYPLRYTSMMTGRSCTLLATSTWLSGSLHSAVQAILTFHLPYCGPNWIQHYLCDAPPILKLACADTSAIETVIFVTVGIVASGCFVLIVLSYVSIVCSILRIRTSEGKHRAFQTCASHCIVVLCFFGPGLFIYLRPGSRKAVDGVVAVFYTVLTPLLNPVVYTLRNKEVKKALLKLKDKVAHSQSK

SEQ ID NO: 331 - DNA, 1038 bp, Homo sapiens
  CDS (28)..(960)
agggagagagaccaagggtgagaagaaatgtccaacgccagcctactgacagcgttcatcctcatgggccttccccatgccccagcgctggacgcccccctctttggagtcttcctggtggtttacgtgctcactgtgctggggaacctcctcatcctgctggtgatcagggtggattctcacctccacaccaccatgtactacttcctcaccaacctgtcgttcattgacatgtggttctccactgtcacggtgcccaaattgctgatgactttggtgttcccaagtggcagggctatctccttccacagctgcatggctcagctctatttctttcacttcctagggggcaccgagtgtttcctctacagggtcatgtcctgtgatcgctacctggccatcagttacccgctcaggtacaccagcatgatgactgggcgctcgtgtactcttctggccaccagcacttggctcagtggctctctgcactctgctgtccaggccatattgactttccatttgccctactgtggacccaactggatccagcactatttgtgtgatgcaccgcccatcctgaaactggcctgtgcagacacctcagccatagagactgtcatttttgtgactgttggaatagtggcctcgggctgctttgtcctgatagtgctgtcctatgtgtccatcgtctgttccatcctgcggatccgcacctcagaggggaagcacagagcctttcagacctgtgcctcccactgtatcgtggtcctttgcttctttggccctggtcttttcatttacctgaggccaggctccaggaaagctgtggatggagttgtggccgttttctacactgtgctgacgccccttctcaaccctgttgtgtacaccctgaggaacaaggaggtgaagaaagctctgttgaagctgaaagacaaagtagcacattctcagagcaaatagacactagggaagattacatatcttagctcttgtgaatagtgctgtgaaaaacatacaggggcaggtatcttttgg

SEQ ID NO: 332 - protein, 311 aa, Homo sapiens; identical to SEQ ID NO: 330

SEQ ID NO: 333 - DNA, 1040 bp, Homo sapiens
  CDS (36)..(968)
tttctgtaagaacagagccccatatatgagaagaaatgtccaacgccaccctactgacagcgttcatcctcacgggccttccccatgccccagggctggacgcccccctctttggaatcttcctggtggtttacgtgctcactgtgctggggaacctcctcatcctgctggtgatcagggtggattctcacctccacacccccatgtactacttcctcaccaacctgtccttcattgacatgtggttctccactgtcacggtgcccaaaatgctgatgaccttggtgtccccaagcggcaggactatctccttccacagctgcgtggctcagctctattttttccacttcctggggagcaccgagtgtttcctctacacagtcatgtcctatgatcgctacctggccatcagttacccgctcaggtacaccaacatgatgactgggcgctcgtgtgccctcctggccaccggcacttggctcagtggctctctgcactctgctgtccagaccatattgactttccatttgccctactgtggacccaaccagatccagcactacttctgtgacgcaccgcccatcctgaaactggcctgtgcagacacctcagccaacgagatggtcatctttgtgaatattgggctagtggcctcgggctgctttgtcctgatagtgctgtcctatgtgtccatcgtctgttccatcctgcggatccgcacctcagaggggaggcacagagcctttcagacctgtgcctcccactgtatcgtggtcctttgcttctttggccctggtcttttcatttacctgaggccaggctccagggacgccttgcatggggttgtggccgttttctacaccacgctgactcctcttttcaaccctgttgtgtacaccctgagaaacaaggaggtaaagaaagctctgttgaagctgaaaaatgggtcagtatttgctcagggtgaatagttaagaaaggccatatatggctaacttttctttttttatttgtaattaaattaaaccttcaacataagc

SEQ ID NO: 334 - protein, 311 aa, Homo sapiens
MSNATLLTAFILTGLPHAPGLDAPLFGIFLVVYVLTVLGNLLILLVIRVDSHLHTPMYYFLTNLSFIDMWFSTVTVPKMLMTLVSPSGRTISFHSCVAQLYFFHFLGSTECFLYTVMSYDRYLAISYPLRYTNMMTGRSCALLATGTWLSGSLHSAVQTILTFHLPYCGPNQIQHYFCDAPPILKLACADTSANEMVIFVNIGLVASGCFVLIVLSYVSIVCSILRIRTSEGRHRAFQTCASHCIVVLCFFGPGLFIYLRPGSRDALHGVVAVFYTTLTPLFNPVVYTLRNKEVKKALLKLKNGSVFAQGE

SEQ ID NO: 335 - DNA, 993 bp, Homo sapiens
tattagaagaagagtgtcatagaagccaataacatttctgggcctgtgagtgaatttatcctcctgggcttcccctgcctgctgcagggagaccaagatcctcctctttgtggtcttctccctcatctaccttctgaccctcatgggtaacacatccatcatctgcgctgtgtggtcaagccagaaactccacacacctatgtacatcctcttggctaatttctctttcctggagatctgctgcattagttctgatgtcccaaaatgttggccaatctcatctcccatatcaagagcatctcctatgctggctgcctgctccagttcttctacttctccatgtgtgctgcagagggctattttctgtctgtgatgtcctttgatcggttccttaccatctgtcgacctttgcattatcccacagtcatgactcaccacctgtgtgtccgattagtggccttctgcagggcaggtggttttctatccatactgatgcctgcagtgcttatgtcccgagtgcctttctgtggccctaacatcactgaccattttttctgtaacctgggaccattgctggcactgtcctgtgccccagttcccaaaactactctgacttgtgctacagtaagctctctcatcatcttcatcaccttcctctacattcttgggtcccatatcttagttttgcgagctgttctgtgggtcccagctggctcaggcaggaacaaagctttctctacatgtgcttcccatttcttggttgtttctttcttctatggctcagtcatggtgatgtatgtgagtccaggctccaggagccgtcctgggacacagaaatttgtgacattgttttactgcacagcaaacccattctttaatcccctgacctacagtctctggaacaaagatatgacagatgcccttaaaaaagtgctgggagtgccatcaaaagaaatatcttggaacacactgaaatgatatacattcttctac

SEQ ID NO: 336 - protein, 321 aa, Homo sapiens
MSVIEANNISGPVSELSSWASPACCRETKILLFVVFSLIYLLTLMGNTSIICAVWSSQKLHTPMYILLANFSFLEICCISSDVPMLANLISHIKSISYAGCLLQFFYFSMCAAEGYFLSVMSFDRFLTICRPLHYPTVMTHHLCVRLVAFCRAGGFLSILMPAVLMSRVPFCGPNITDHFFCNLGPLLALSCAPVPKTTLTCATVSSLIIFITFLYILGSHILVLRAVLWVPAGSGRNKAFSTCASHFLVVSFFYGSVMVMYVSPGSRSRPGTQKFVTLFYCTANPFFNPLTYSLWNKDMTDALKKVLGVPSKEISWNTLK

SEQ ID NO: 337 - DNA, 1012 bp, Homo sapiens
  CDS (25)..(987)
tcatttccttcatagattagaagaatgagtgtcatagaagccaataacatttctgggcctgtgagtgaatttatcctcctgggcttccctgcctgctgcagggagaccaagatcctcctctttgtggtcttctccctcatctaccttctgaccctcatgggtaacacatccatcatctgcgctgtgtggtcaagccagaaactccacacacctatgtacatcctcttggctaatttctctttcctggagatctgctgcattagttctgatgtcccaatgttggccaatctcatctcccatatcaagagcatctcctatgctggctgcctgctccagttcttctacttctccatgtgtgctgcagaaggctactttctgtctgtgatgtcctttgatcggttccttaccatctgtcgacctttgcattatcccacagtcatgactcaccacctgtgtgtccgattagtggccttctgcagggcaggtggttttctatccatactgatgcctgcagtgcttatgtcccgagtgcctttctgtggccctaacatcactgaccattttttctgtaacctgggaccattgctggcactgtcctgtgccccagttcccaaaactactctgacttgtgctacagtaagctctctcatcatcttcatcaccttcctctacattcttgggtcccatatcttagttttgcgagctgttctgtgggtcccagctggctcaggcaggaacaaagctttctctacatgtgcttcccatttcttggttgtttctttcttctatggctcagtcatggtgatgtatgtgagtccaggctccaggagccgccctgggacacagaaatttgtgacattgttttactgcacagcaaccccattctttaatcccctgacctacagtctctggaacaaagatatgacagatgcccttaaaaaagtgctgggagtgccatcaaaagaaatatattggaacacactgaaatgatatacattcttctacaattatt

SEQ ID NO: 338 - protein, 321 aa, Homo sapiens
MSVIEANNISGPVSEFILLGFPACCRETKILLFVVFSLIYLLTLMGNTSIICAVWSSQKLHTPMYILLANFSFLEICCISSDVPMLANLISHIKSISYAGCLLQFFYFSMCAAEGYFLSVMSFDRFLTICRPLHYPTVMTHHLCVRLVAFCRAGGFLSILMPAVLMSRVPFCGPNITDHFFCNLGPLLALSCAPVPKTTLTCATVSSLIIFITFLYILGSHILVLRAVLWVPAGSGRNKAFSTCASHFLVVSFFYGSVMVMYVSPGSRSRPGTQKFVTLFYCTATPFFNPLTYSLWNKDMTDALKKVLGVPSKEIYWNTLK

SEQ ID NO: 339 - DNA, 1604 bp, Homo sapiens
  CDS (648)..(1580)
actcactatagggctcgagcggccgcccgggcaggttggatatttggtgtacttttcctcaattgtgaaatctctgggtggggaccacagctcagtgttgagttactgacctcttcttggtcctgtggattagcatgcagctaatctgtttgacctctgtttggaattcggaattcttaatgactacacatctttgatacaatagatgatacctcaaacatccttttgaacagctgttcttttccatgagtcttggtctattctgacatttatgtctcccttcaatcacgtctttggccttagaagattgagttactggattctttatatattctagtggtcatctctgaaatgtgctcagagagcacctaaattaaccatccaatacgagttgagtgtgttaagttaaaaaaaaaaaaaagatttttctgagtattcctgaccttacatcagtgaacatttatgttttaaagtcttacataagatactgtgtgtgaaagcattttcttcccaaatttacatgagtgcctaaattgttatactttttggttaaatagatattggaaaaataagtgtgcaattatagcatttaatcccattataatattcatttgtttttctttcagttggcaccattcccaatttagatggggactggaaatgacaccactgtggtagagtttactcttttgggattatccgaggatactacagtttgtgctattttatttcttgtgtttctaggaatttatgttgtcaccttaatgggtaatatcagcataattgtattgatcagaagaagtcatcatcttcatacacccatgtacattttcctctgccatttggcctttgtagacattgggtactcctcatcagtcacacctgtcatgctcatgagcttcctaaggaaagaaacctctctccctattgctggttgtgtggcccagctctgttctgtagtgacgtttggtacggccgagtgcttcctgctggctgccatggcctatgatcgctatgtggccatctgctcacccctgctctactctacctgcatgtcccctggagtctgcatcatcttagtgggcatgtcctacctgggtggatgtgtgaatgcttggacattcattggctgcttattaagactgtccttctgtgggccaaataaagtcaatcactttttctgtgactattcaccacttttgaagcttgcttgttcccatgattttacttttgaaataattccagctatctcttctggatctatcattgtggccactgtgtgtgtcatagccatatcctacatctatatcctcatcaccatcctgaagatgcactccaccaagggccgccacaaggccttctccacctgcacctcccacctcactgcagtcactctgttctatgggaccattaccttcatttatgtgatgcccaagtccagctactcaactgaccagaacaaggtggtgtctgtgttctacaccgtggtgattcccatgttgaaccccctgatctacagcctcaggaacaaggagattaagggggctctgaagagagagcttagaataaaaatattttcttgatgaaactagttagtttgaaga

SEQ ID NO: 340 - protein, 311 aa, Homo sapiens
MGTGNDTTVVEFTLLGLSEDTTVCAILFLVFLGIYVVTLMGNISIIVLIRRSHHLHTPMYIFLCHLAFVDIGYSSSVTPVMLMSFLRKETSLPIAGCVAQLCSVVTFGTAECFLLAAMAYDRYVAICSPLLYSTCMSPGVCIILVGMSYLGGCVNAWTFIGCLLRLSFCGPNKVNHFFCDYSPLLKLACSHDFTFEIIPAISSGSIIVATVCVIAISYIYILITILKMHSTKGRHKAFSTCTSHLTAVTLFYGTITFIYVMPKSSYSTDQNKVVSVFYTVVIPMLNPLIYSLRNKEIKGALKRELRIKIFS

SEQ ID NO: 341 - DNA, 984 bp, Homo sapiens
  CDS (24)..(956)
agttggcaccattcccaatatagatggggactggaaatgacaccactgtggtagagtttactcttttggggttatctgaggatactacagtttgtgctattttatttcttgtgtttctaggaatttatgttgtcaccttaatgggtaatatcagcataattgtattgatcagaagaagtcatcatcttcatacacccatgtacattttcctctgccatttggcctttgtagacattgggtactcctcatcagtcacacctgtcatgctcatgagcttcctaaggaaagaaacctctctccctgttgctggttgtgtggcccagctctgttctgtagtgacgtttggtacggccgagtgcttcctgctggctgccatggcctatgatcgctatgtggccatctgctcacccctgctctactctacctgcatgtcccctggagtctgcatcatcttagtgggcatgtcctacctgggtggatgtgtgaatgcttggacattcattggctgcttattaagactgtccttctgtgggccaaataaagtcaatcactttttctgtgactattcaccacttttgaagcttgcttgttcccatgattttacttttgaaataattccagctatctcttctggatctatcattgtggccactgtgtgtgtcatagccatatcctacatctatatcctcatcaccatcctgaagatgcactccaccaagggccgccacaaggccttctccacctgcacctcccacctcactgcagtcactctgttctatgggaccattaccttcatttatgtgatgcccaagtccagctactcaactgaccagaacaaggtggtgtctgtgttctacaccgtggtgattcccatgttgaaccccctgatctacagcctcaggaacaaggagattaagggggctctgaagagagagcttagaataaaaatattttcttgatgaaactagttagtttgaagaatct

SEQ ID NO: 342 - protein, 311 aa, Homo sapiens
MGTGNDTTVVEFTLLGLSEDTTVCAILFLVFLGIYVVTLMGNISIIVLIRRSHHLHTPMYIFLCHLAFVDIGYSSSVTPVMLMSFLRKETSLPVAGCVAQLCSVVTFGTAECFLLAAMAYDRYVAICSPLLYSTCMSPGVCIILVGMSYLGGCVNAWTFIGCLLRLSFCGPNKVNHFFCDYSPLLKLACSHDFTFEIIPAISSGSIIVATVCVIAISYIYILITILKMHSTKGRHKAFSTCTSHLTAVTLFYGTITFIYVMPKSSYSTDQNKVVSVFYTVVIPMLNPLIYSLRNKEIKGALKRELRIKIFS

SEQ ID NO: 343 - DNA, 952 bp, Homo sapiens
  CDS (7)..(939)
atatagatggggactggaaatgacaccactgtggtagagtttactcttttggggttatccgaggatactacagtttgtgctattttatttcttgtgtttctaggaatttatgttgtcaccttaatgggtaatatcagcataattgtattgatcagaagaagtcatcatcttcatacacccatgtacattttcctctgccatttggcctttgtagacattgggtactcctcatcagtcacacctgtcatgctcatgagcttcctaaggaaagaaacctctctccctgttgctggttgtgtggcccagctctgttctgtggtgacgtttggtacggccgagtgcttcctgctggctgccatggcctatgatcgctatgtggccatctgctcacccctgctctactctacctgcatgtcccctggagtctgcatcatcttagtgggcatgtcctacctgggtggatgtgtgaatgcttggacattcattggctgcttattaagactgtccttctgtgggccaaataaagtcaatcactttttctgtgactattcaccacttttgaagcttgcttgttcccatgattttacttttgaaataattccagctatctcttctggatctatcattgtggccactgtgtgtgtcatagccatatcctacatctatatcctcatcaccatcctgaagatgcactccaccaagggccgccacaaggccttctccacctgcacctcccacctcactgcagtcactctgttttatgggaccattaccttcatttatgtgatgcccaagtccagctactcaactgaccagaacaaggtggtgtctgtgttctacaccgtggtgattcccatgttgaaccccctgatctacagcctcaggaacaaggagattaagggggctctgaagagagagcttagaataaaaatattttcttgatgaaactagt

SEQ ID NO: 344 - protein, 311 aa, Homo sapiens; identical to SEQ ID NO: 342

SEQ ID NO: 345 - DNA, 964 bp, Homo sapiens
  CDS (8)..(940)
tatatagatggggactggaaatgacaccactgtggtagagtttactcttttggggttatccgaggatactacagtttgtgctattttatttcttgtgtttctaggaatttatgttgtcaccttaatgggtaatatcagcataattgtattgatcagaagaagtcatcatcttcatacacccatgtacattttcctctgccatttggcctttgtagacattgggtactcctcatcagtcacacctgtcatgctcatgagcttcctaaggaaagaaacctctctccctgttgctggttgtgtggcccagctctgttctgtggtgacgtttggtacggccgagtgcttcctgctggctgccatggcctatgatcgctatgtggccatctgctcacccctgctctactctacctgcatgtcccctggagtctgcatcatcttagtgggcatgtcctacctgggtggatgtgtgaatgcttggacattcattggctgcttattaagactgtccttctgtgggccaaataaagtcaatcactttttctgtgactattcaccacttttgaagcttgcttgttcccatgattttacttttgaaataattccagctatctcttctggatctatcattgtggccactgtgtgtgtcatagccatatcctacatctatatcctcatcaccatcctgaagatgcactccaccaagggccgccacaaggccttctccacctgcacctcccacctcactgcagtcactctgttttatgggaccattaccttcatttatgtgatgcccaagtccagctactcaactgaccagaacaaggtggtgtctgtgttctacaccgtggtgattcccatgttgaaccccctgatctacagcctcaggaacaaggagattaagggggctctgaagagagagcttagaataaaaatattttcttgatgaaactagttagtttgaaga

SEQ ID NO: 346 - protein, 311 aa, Homo sapiens; identical to SEQ ID NO: 342

SEQ ID NO: 347 - DNA, 1604 bp, Homo sapiens
  CDS (648)..(1580)
actcactatagggctcgagcggccgcccgggcaggttggatatttggtgtacttttcctcaattgtgaaatctctgggtggggaccacagctcagtgttgagttactgacctcttcttggtcctgtggattagcatgcagctaatctgtttgacctctgtttggaattcggaattcttaatgactacacatctttgatacaatagatgatacctcaaacatccttttgaacagctgttcttttccatgagtcttggtctattctgacatttatgtctcccttcaatcacgtctttggccttagaagattgagttactggattctttatatattctagtggtcatctctgaaatgtgctcagagagcacctaaattaaccatccaatacgagttgagtgtgttaagttaaaaaaaaaaaaaagatttttctgagtattcctgaccttacatcagtgaacatttatgctttaaagtcttacataagatactgtgtgtgaaagcattttcttcccaaatttacatgagtgcctaaattgttatactttttggttaaatagatattggaaaaataagtgtgcaattatagcatttaatcccattataatattcatttgtttttctttcagttggcaccattcccaatttagatggggactggaaatgacaccactgtggtagagtttactcttttgggattatccgaggatactacagtttgtgctattttatttcttgtgtttctaggaatttatgttgtcaccttaatgggtaatatcagcataattgtattgatcagaagaagtcatcatcttcatacacccatgtacattttcctctgccatttggcctttgtagacattgggtactcctcatcagtcacacctgtcatgctcatgagcttcctaaggaaagaaacctctctccctattgctggttgtgtggcccagctctgttctgtagtgacgtttggtacggccgagtgcttcctgctggctgccatggcctatgatcgctatgtggccatctgctcacccctgctctactctacctgcatgtcccctggagtctgcatcatcttagtgggcatgtcctacctgggtggatgtgtgaatgcttggacattcattggctgcttattaagactgtccttctgtgggccaaataaagtcaatcactttttctgtgactattcaccacttttgaagcttgcttgttcccatgattttacttttgaaataattccagctatctcttctggatctatcattgtggccactgtgtgtgtcatagccatatcctacatctatatcctcatcaccatcctgaagatgcactccaccaagggccgccacaaggccttctccacctgcacctcccacctcactgcagtcactctgttctatgggaccattaccttcatttatgtgatgcccaagtccagctactcaactgaccagaacaaggtggtgtctgtgttctacaccgtggtgattcccatgttgaaccccctgatctacagcctcaggaacaaggagattaagggggctctgaagagagagcttagaataaaaatattttcttgatgaaactagttagtttgaaga

SEQ ID NO: 348 - protein, 311 aa, Homo sapiens; identical to SEQ ID NO: 340

SEQ ID NO: 349 - DNA, 1604 bp, Homo sapiens
  CDS (648)..(1580)
actcactatagggctcgagcggccgcccgggcaggttggatatttggtgtacttttcctcaattgtgaaatctctgggtggggaccacagctcagtgttgagttactgacctcttcttggtcctgtggattagcatgcagctaatctgtttgacctctgtttggaattcggaattcttaatgactacacatctttgatacaatagatgatacctcaaacatccttttgaacagctgttcttttccatgagtcttggtctattctgacatttatgtctcccttcaatcacgtctttggccttagaagattgagttactggattctttatatattctagtggtcatctctgaaatgtgctcagagagcacctaaattaaccatccaatacgagttgagtgtgttaagttaaaaaaaaaaaaaagatttttctgagtattcctgaccttacatcagtgaacatttatgttttaaagtcttacataagatactgtgtgtgaaagcattttcttcccaaatttacatgagtgcctaaattgttatactttttggctaaatagatattggaaaaataagtgtgcaattatagcatttaatcccattataatattcatttgtttttctttcagttggcaccattcccaatttagatggggactggaaatgacaccactgtggtagagtttactcttttgggattatccgaggatactacagtttgtgctattttatttcttgtgtttctaggaatttatgttgtcaccttaatgggtaatatcagcataattgtattgatcagaagaagtcatcatcttcatacacccatgtacattttcctctgccatttggcctttgtagacattgggtactcctcatcagtcacacctgtcatgctcatgagcttcctaaggaaagaaacctctctccctattgctggttgtgtggcccagctctgttctgtagtgacgtttggtacggccgagtgcttcctgctggctgccatggcctatgatcgctatgtggccatctgctcacccctgctctactctacctgcatgtcccctggagtctgcatcatcttagtgggcatgtcctacctgggtggatgtgtgaatgcttggacattcattggctgcttattaagactgtccttctgtgggccaaataaagtcaatcactttttctgtgactattcaccacttttgaagcttgcttgttcccatgattttacttttgaaataattccagctatctcttctggatctatcattgtggccactgtgtgtgtcatagccatatcctacatctatatcctcatcaccatcctgaagatgcactccaccaagggccgccacaaggccttctccacctgcacctcccacctcactgcagtcactctgttctatgggaccattaccttcatttatgtgatgcccaagtccagctactcaactgaccagaacaaggtggtgtctgtgttctacaccgtggtgattcccatgttgaaccccctgatctacagcctcaggaacaaggagattaagggggctctgaagagagagcttagaataaaaatattttcttgatgaaactagttagtttgaaga

SEQ ID NO: 350 - protein, 311 aa, Homo sapiens; identical to SEQ ID NO: 340

SEQ ID NO: 351 - DNA, 1604 bp, Homo sapiens
  CDS (648)..(1580)
actcactatagggctcgagcggccgcccgggcaggttggatatttggtgtacttttcctcaattgtgaaatctctgggtggggaccacagctcagtgttgagttactgacctcttcttggtcctgtggattagcatgcagctaatctgtttgacctctgtttggaattcggaattcttaatgactacacatctttgatacaatagatgatacctcaaacatccttttgaacagctgttcttttccatgagtcttggtctattctgacatttatgtctcccttcaatcacgtctttggccttagaagattgagttactggattctttatatattctagtggtcatctctgaaatgtgctcagagagcacctaaattaaccatccaatacgagttgagtgtgttaagttaaaaaaaaaaaaaagatttttctgagtattcctgaccttacatcagtgaacatttatgttttaaagtcttacataagatactgtgtgtgaaagcattttcttcccaaatttacatgagtgcctaaattgttatactttttggttaaatagatattggaaaaataagtgtgcaattatagcatttaatcccattataatattcatttgtttttctttcagttggcaccattcccaatatagatggggactggaaatgacaccactgtggtagagtttactcttttgggattatccgaggatactacagtttgtgctattttatttcttgtgtttctaggaatttatgttgtcaccttaatgggtaatatcagcataattgtattgatcagaagaagtcatcatcttcatacacccatgtacattttcctctgccatttggcctttgtagacattgggtactcctcatcagtcacacctgtcatgctcatgagcttcctaaggaaagaaacctctctccctattgctggttgtgtggcccagctctgttctgtagtgacgtttggtacggccgagtgcttcctgctggctgccatggcctatgatcgctatgtggccatctgctcacccctgctctactctacctgcatgtcccctggagtctgcatcatcttagtgggcatgtcctacctgggtggatgtgtgaatgcttggacattcattggctgcttattaagactgtccttctgtgggccaaataaagtcaatcactttttctgtgactattcaccacttttgaagcttgcttgttcccatgattttacttttgaaataattccagctatctcttctggatctatcattgtggccactgtgtgtgtcatagccatatcctacatctatatcctcatcaccatcctgaagatgcactccaccaagggccgccacaaggccttctccacctgcacctcccacctcactgcagtcactctgttctatgggaccattaccttcatttatgtgatgcccaagtccagctactcaactgaccagaacaaggtggtgtctgtgttctacaccgtggtgattcccatgttgaaccccctgatctacagcctcaggaacaaggagattaagggggctctgaagagagagcttagaataaaaatattttcttgatgaaactagttagtttgaaga

SEQ ID NO: 352 - protein, 311 aa, Homo sapiens; identical to SEQ ID NO: 340

SEQ ID NO: 353 - DNA, 1604 bp, Homo sapiens
  CDS (648)..(1580)
actcactatagggctcgagcggccgcccgggcaggttggatatttggtgtacttttcctcaattgtgaaatctctgggtggggaccacagctcagtgttgagttactgacctcttcttggtcctgtggattagcatgcagctaatctgtttgacctctgtttggaattcggaattcttaatgactacacatctttgatacaatagatgatacctcaaacatccttttgaacagctgttcttttccatgagtcttggtctattctgacatttatgtctcccttcaatcacgtctttggccttagaagattgagttactggattctttatatattctagtggtcatctctgaaatgtgctcagagagcacctaaattaaccatccaatacgagttgagtgtgttaagttaaaaaaaaaaaaaagatttttctgagtattcctgaccttacatcagtgaacatttatgttttaaagtcttacataagatactgtgtgtgaaagcattttcttcccaaatttacatgagtgcctaaattgttatactttttggttaaatagatattggaaaaataagtgtgcaattatagcatttaatcccattataatattcatttgtttttctttcagttggcaccattcccaatttagatggggactggaaatgacaccactgtggtagagtttactcttttggggttatccgaggatactacagtttgtgctattttatttcttgtgtttctaggaatttatgttgtcaccttaatgggtaatatcagcataattgtattgatcagaagaagtcatcatcttcatacacccatgtacattttcctctgccatttggcctttgtagacattgggtactcctcatcagtcacacctgtcatgctcatgagcttcctaaggaaagaaacctctctccctattgctggttgtgtggcccagctctgttctgtagtgacgtttggtacggccgagtgcttcctgctggctgccatggcctatgatcgctatgtggccatctgctcacccctgctctactctacctgcatgtcccctggagtctgcatcatcttagtgggcatgtcctacctgggtggatgtgtgaatgcttggacattcattggctgcttattaagactgtccttctgtgggccaaataaagtcaatcactttttctgtgactattcaccacttttgaagcttgcttgttcccatgattttacttttgaaataattccagctatctcttctggatctatcattgtggccactgtgtgtgtcatagccatatcctacatctatatcctcatcaccatcctgaagatgcactccaccaagggccgccacaaggccttctccacctgcacctcccacctcactgcagtcactctgttctatgggaccattaccttcatttatgtgatgcccaagtccagctactcaactgaccagaacaaggtggtgtctgtgttctacaccgtggtgattcccatgttgaaccccctgatctacagcctcaggaacaaggagattaagggggctctgaagagagagcttagaataaaaatattttcttgatgaaactagttagtttgaaga

SEQ ID NO: 354 - protein, 311 aa, Homo sapiens; identical to SEQ ID NO: 340

SEQ ID NO: 355 - DNA, 1604 bp, Homo sapiens
  CDS (648)..(1580)
actcactatagggctcgagcggccgcccgggcaggttggatatttggtgtacttttcctcaattgtgaaatctctgggtggggaccacagctcagtgttgagttactgacctcttcttggtcctgtggattagcatgcagctaatctgtttgacctctgtttggaattcggaattcttaatgactacacatctttgatacaatagatgatacctcaaacatccttttgaacagctgttcttttccatgagtcttggtctattctgacatttatgtctcccttcaatcacgtctttggccttagaagattgagttactggattctttatatattctagtggtcatctctgaaatgtgctcagagagcacctaaattaaccatccaatacgagttgagtgtgttaagttaaaaaaaaaaaaaagatttttctgagtattcctgaccttacatcagtgaacatttatgttttaaagtcttacataagatactgtgtgtgaaagcattttcttcccaaatttacatgagtgcctaaattgttatactttttggttaaatagatattggaaaaataagtgtgcaattatagcatttaatcccattataatattcatttgtttttctttcagttggcaccattcccaatttagatggggactggaaatgacaccactgtggtagagtttactcttttgggattatccgaggatactacagtttgtgctattttatttcttgtgtttctaggaatttatgttgtcaccttaatgggtaatatcagcataattgtattgatcagaagaagtcatcatcttcatacacccatgtacattttcctctgccatttggcctttgtagacattgggtactcctcatcagtcacacctgtcatgctcatgagcttcctaaggaaagaaacctctctccctgttgctggttgtgtggcccagctctgttctgtagtgacgtttggtacggccgagtgcttcctgctggctgccatggcctatgatcgctatgtggccatctgctcacccctgctctactctacctgcatgtcccctggagtctgcatcatcttagtgggcatgtcctacctgggtggatgtgtgaatgcttggacattcattggctgcttattaagactgtccttctgtgggccaaataaagtcaatcactttttctgtgactattcaccacttttgaagcttgcttgttcccatgattttacttttgaaataattccagctatctcttctggatctatcattgtggccactgtgtgtgtcatagccatatcctacatctatatcctcatcaccatcctgaagatgcactccaccaagggccgccacaaggccttctccacctgcacctcccacctcactgcagtcactctgttctatgggaccattaccttcatttatgtgatgcccaagtccagctactcaactgaccagaacaaggtggtgtctgtgttctacaccgtggtgattcccatgttgaaccccctgatctacagcctcaggaacaaggagattaagggggctctgaagagagagcttagaataaaaatattttcttgatgaaactagttagtttgaaga

SEQ ID NO: 356 - protein, 311 aa, Homo sapiens; identical to SEQ ID NO: 342

SEQ ID NO: 357 - DNA, 1604 bp, Homo sapiens
  CDS (648)..(1580)
actcactatagggctcgagcggccgcccgggcaggttggatatttggtgtacttttcctcaattgtgaaatctctgggtggggaccacagctcagtgttgagttactgacctcttcttggtcctgtggattagcatgcagctaatctgtttgacctctgtttggaattcggaattcttaatgactacacatctttgatacaatagatgatacctcaaacatccttttgaacagctgttcttttccatgagtcttggtctattctgacatttatgtctcccttcaatcacgtctttggccttagaagattgagttactggattctttatatattctagtggtcatctctgaaatgtgctcagagagcacctaaattaaccatccaatacgagttgagtgtgttaagttaaaaaaaaaaaaaagatttttctgagtattcctgaccttacatcagtgaacatttatgttttaaagtcttacataagatactgtgtgtgaaagcattttcttcccaaatttacatgagtgcctaaattgttatactttttggttaaatagatattggaaaaataagtgtgcaattatagcatttaatcccattataatattcatttgtttttctttcagttggcaccattcccaatttagatggggactggaaatgacaccactgtggtagagtttactcttttgggattatccgaggatactacagtttgtgctattttatttcttgtgtttctaggaatttatgttgtcaccttaatgggtaatatcagcataattgtattgatcagaagaagtcatcatcttcatacacccatgtacattttcctctgccatttggcctttgtagacattgggtactcctcatcagtcacacctgtcatgctcatgagcttcctaaggaaagaaacctctctccctattgctggttgtgtggcccagctctgttctgtggtgacgtttggtacggccgagtgcttcctgctggctgccatggcctatgatcgctatgtggccatctgctcacccctgctctactctacctgcatgtcccctggagtctgcatcatcttagtgggcatgtcctacctgggtggatgtgtgaatgcttggacattcattggctgcttattaagactgtccttctgtgggccaaataaagtcaatcactttttctgtgactattcaccacttttgaagcttgcttgttcccatgattttacttttgaaataattccagctatctcttctggatctatcattgtggccactgtgtgtgtcatagccatatcctacatctatatcctcatcaccatcctgaagatgcactccaccaagggccgccacaaggccttctccacctgcacctcccacctcactgcagtcactctgttctatgggaccattaccttcatttatgtgatgcccaagtccagctactcaactgaccagaacaaggtggtgtctgtgttctacaccgtggtgattcccatgttgaaccccctgatctacagcctcaggaacaaggagattaagggggctctgaagagagagcttagaataaaaatattttcttgatgaaactagttagtttgaaga

SEQ ID NO: 358 - protein, 311 aa, Homo sapiens; identical to SEQ ID NO: 340

SEQ ID NO: 359 - DNA, 1604 bp, Homo sapiens
  CDS (648)..(1580)
actcactatagggctcgagcggccgcccgggcaggttggatatttggtgtacttttcctcaattgtgaaatctctgggtggggaccacagctcagtgttgagttactgacctcttcttggtcctgtggattagcatgcagctaatctgtttgacctctgtttggaattcggaattcttaatgactacacatctttgatacaatagatgatacctcaaacatccttttgaacagctgttcttttccatgagtcttggtctattctgacatttatgtctcccttcaatcacgtctttggccttagaagattgagttactggattctttatatattctagtggtcatctctgaaatgtgctcagagagcacctaaattaaccatccaatacgagttgagtgtgttaagttaaaaaaaaaaaaaagatttttctgagtattcctgaccttacatcagtgaacatttatgttttaaagtcttacataagatactgtgtgtgaaagcattttcttcccaaatttacatgagtgcctaaattgttatactttttggttaaatagatattggaaaaataagtgtgcaattatagcatttaatcccattataatattcatttgtttttctttcagttggcaccattcccaatttagatggggactggaaatgacaccactgtggtagagtttactcttttgggattatccgaggatactacagtttgtgctattttatttcttgtgtttctaggaatttatgttgtcaccttaatgggtaatatcagcataattgtattgatcagaagaagtcatcatcttcatacacccatgtacattttcctctgccatttggcctttgtagacattgggtactcctcatcagtcacacctgtcatgctcatgagcttcctaaggaaagaaacctctctccctattgctggttgtgtggcccagctctgttctgtagtgacgtttggtacggccgagtgcttcctgctggctgccatggcctatgatcgctatgtggccatctgctcacccctgctctactctacctgcatgtctcctggagtctgcatcatcttagtgggcatgtcctacctgggtggatgtgtgaatgcttggacattcattggctgcttattaagactgtccttctgtgggccaaataaagtcaatcactttttctgtgactattcaccacttttgaagcttgcttgttcccatgattttacttttgaaataattccagctatctcttctggatctatcattgtggccactgtgtgtgtcatagccatatcctacatctatatcctcatcaccatcctgaagatgcactccaccaagggccgccacaaggccttctccacctgcacctcccacctcactgcagtcactctgttctatgggaccattaccttcatttatgtgatgcccaagtccagctactcaactgaccagaacaaggtggtgtctgtgttctacaccgtggtgattcccatgttgaaccccctgatctacagcctcaggaacaaggagattaagggggctctgaagagagagcttagaataaaaatattttcttgatgaaactagttagtttgaaga

SEQ ID NO: 360 - protein, 311 aa, Homo sapiens; identical to SEQ ID NO: 340

SEQ ID NO: 361 - DNA, 1604 bp, Homo sapiens
  CDS (648)..(1580)
actcactatagggctcgagcggccgcccgggcaggttggatatttggtgtacttttcctcaattgtgaaatctctgggtggggaccacagctcagtgttgagttactgacctcttcttggtcctgtggattagcatgcagctaatctgtttgacctctgtttggaattcggaattcttaatgactacacatctttgatacaatagatgatacctcaaacatccttttgaacagctgttcttttccatgagtcttggtctattctgacatttatgtctcccttcaatcacgtctttggccttagaagattgagttactggattctttatatattctagtggtcatctctgaaatgtgctcagagagcacctaaattaaccatccaatacgagttgagtgtgttaagttaaaaaaaaaaaaaagatttttctgagtattcctgaccttacatcagtgaacatttatgttttaaagtcttacataagatactgtgtgtgaaagcattttcttcccaaatttacatgagtgcctaaattgttatactttttggttaaatagatattggaaaaataagtgtgcaattatagcatttaatcccattataatattcatttgtttttctttcagttggcaccattcccaatttagatggggactggaaatgacaccactgtggtagagtttactcttttgggattatccgaggatactacagtttgtgctattttatttcttgtgtttctaggaatttatgttgtcaccttaatgggtaatatcagcataattgtattgatcagaagaagtcatcatcttcatacacccatgtacattttcctctgccatttggcctttgtagacattgggtactcctcatcagtcacacctgtcatgctcatgagcttcctaaggaaagaaacctctctccctattgctggttgtgtggcccagctctgttctgtagtgacgtttggtacggccgagtgcttcctgctggctgccatggcctatgatcgctatgtggccatctgctcacccctgctctactctacctgcatgtcccctggagtctgcatcatcttagtgggcatgtcctacctgggtggatgtgtgaatgcttggacattcattggctgcttattaagactgtccttctgtgggccaaataaagtcaatcactttttctgtgactattcaccacttttgaagcttgcttgttcccatgattttacttttgaaataattccagctatctcttctggatctatcattgtggccactgtgtgtgtcatagccatatcctacatctatatcctcatcaccatcctgaagatgcactccaccaagggccgccacaaggccttctccacctgcacctcccacctcactgcagtcactctgttctatgggaccattaccttcatttatgtgatgcccaagtccagctactcaactgaccagaacaaggtggtgtctgtgttctacgccgtggtgattcccatgttgaaccccctgatctacagcctcaggaacaaggagattaagggggctctgaagagagagcttagaataaaaatattttcttgatgaaactagttagtttgaaga

SEQ ID NO: 362 - protein, 311 aa, Homo sapiens
MGTGNDTTVVEFTLLGLSEDTTVCAILFLVFLGIYVVTLMGNISIIVLIRRSHHLHTPMYIFLCHLAFVDIGYSSSVTPVMLMSFLRKETSLPIAGCVAQLCSVVTFGTAECFLLAAMAYDRYVAICSPLLYSTCMSPGVCIILVGMSYLGGCVNAWTFIGCLLRLSFCGPNKVNHFFCDYSPLLKLACSHDFTFEIIPAISSGSIIVATVCVIAISYIYILITILKMHSTKGRHKAFSTCTSHLTAVTLFYGTITFIYVMPKSSYSTDQNKVVSVFYAVVIPMLNPLIYSLRNKEIKGALKRELRIKIFS

SEQ ID NO: 363 - DNA, 1378 bp, Homo sapiens
  CDS (473)..(1330)
tgaaattggagagtcatacaaaatccagaatggagaaaagagagataaacagtgcttttggggtaaaatccaggtataggtatttgggcccactctatgtcatctatacatattatcatattagaatcattcttctcttcactcaggctcctgaccttgacctctttccaggtgcatttaactccctttcctcaggttctctaagagttgcctgacacttgcccaggtcccctgaataaaatacaggtaaatcagtgcataagaagctttatacagtgatctcagacttgtgaccaagagcccctctgcaccattgatagacagtggccgtgcccaccaggaggatgggcaatcacactgcagtgagcctattccttctgtggggattttccagtttttcagacctgcagagtctactttttgtggtgattctcttctacatgtgaccatcctagctgcaaacgtgtccataatgggggccatcaagctcagccacaaccttcacactcctatgtactttttcctctgtggcctgtccttttcagaaacttgtaccactgtggtagtaatccctcgcatgttggtggactttctatcagagagcaagaccatttctcttcctgagtgtgccacacagatgtttttctttctgggctttgcatccaacaactgtttcatcatggccgctatgtcctacgaccgctacacggccatccacaacccactgcagtaccacacccttatgacaagaaagatctgcttgcagatgatgatggcttcttggatggttgggttcctgttttctctgtgcatcatcgtcactgtattcaacttgtctctttgcgacttgaacactatccagcactatttctgtgatatctcaccagtggtctcccttgcttgtaattacactttctatcatgaaatggctatttttgtgctctctgcctttgtgttggtgggcagctgtattttaattatgatttcctatgtcttcattgtgttcatagtcataaagatgccctctgcaaaggggaggtctaaggccttctcaacttgctcctcccacctcactgttgtgtccatacactatggatttgcttgctttgtctatttgaggcccaagaacagcaactccttcgatgaagacatgccgacggccatgatatatacaatactgatgcctctgcttaaccccatcgtgtacagtctgagaaacaaagaaatgcagatagccctaagaaaaacactaggcagtgtatttggggttttccctcagaagacaaaaaaagagcctgaacatttaaaaaaattacacagcattgataaataaaggtgagaaaagcgaaaaaaaaaaaaaaaaaaaaaaaaaaaaggg

SEQ ID NO: 364 - protein, 286 aa, Homo sapiens
MGAIKLSHNLHTPMYFFLCGLSFSETCTTVVVIPRMLVDFLSESKTISLPECATQMFFFLGFASNNCFIMAAMSYDRYTAIHNPLQYHTLMTRKICLQMMMASWMVGFLFSLCIIVTVFNLSLCDLNTIQHYFCDISPVVSLACNYTFYHEMAIFVLSAFVLVGSCILIMISYVFIVFIVIKMPSAKGRSKAFSTCSSHLTVVSIHYGFACFVYLRPKNSNSFDEDMPTAMIYTILMPLLNPIVYSLRNKEMQIALRKTLGSVFGVFPQKTKKEPEHLKKLHSIDK

SEQ ID NO: 365 - DNA, 1028 bp, Homo sapiens
  CDS (23)..(1006)
agtggccgtgcccaccaggaggatgggcaatcacactgcagtgagcctattccttctgtggggattttccagtttttcagacctgcagagtctactttgtggtgattctcttctacatgtgaccatcctagctgcaaacgtgtccataatgggggccatcaagctcagccacaaccttcacactcctatgtactttttcctctgtggcctgtccttttcagaaacttgtaccactgtggtagtaatccctcgcatgttggtggactttctatcagagagcaagaccatttctcttcctgagtgtgccacacagatgtttttctttctgggctttgcatccaacaactgtttcatcatggccgctatgtcctacgaccgctacacggccatccacaacccactgcagtaccacacccttatgacaagaaagatctgcttgcagatgatgatggcttcttggatggttgggttcctgttttctctgtgcatcatcgtcactgtattcaacttgtctctttgcgacttgaacactatccagcactatttctgtgatatctcaccagtggtctcccttgcttgtaattacactttctatcatgaaatggctatttttgtgctctctgcctttgtgttggtgggcagctgtattttaattatgatttcctatgtcttcattgtgttcatagtcataaagatgccctctgcaaaggggaggtctaaggccttctcaacttgctcctcccacctcactgttgtgtccatacactatggatttgcttgctttgtctatttgaggcccaagaacagcaactccttcgatgaagacatgctgacggccatgatatatacaatactgatgcctctgcttaaccccatcgtgtacagtctgagaaacaaagaaatgcagatagccctaagaaaaacactaggcagtgtatttggggttttccctcagaagacaaaaaaagagcctgaacatttaaaaaaattacacagcattgataaataaaggtgagaaaagtggagta

SEQ ID NO: 366 - protein, 328 aa, Homo sapiens
MGNHTAVSLFLLWGFSSFSDLQSLLCGDSLLHVTILAANVSIMGAIKLSHNLHTPMYFFLCGLSFSETCTTVVVIPRMLVDFLSESKTISLPECATQMFFFLGFASNNCFIMAAMSYDRYTAIHNPLQYHTLMTRKICLQMMMASWMVGFLFSLCIIVTVFNLSLCDLNTIQHYFCDISPVVSLACNYTFYHEMAIFVLSAFVLVGSCILIMISYVFIVFIVIKMPSAKGRSKAFSTCSSHLTVVSIHYGFACFVYLRPKNSNSFDEDMLTAMIYTILMPLLNPIVYSLRNKEMQIALRKTLGSVFGVFPQKTKKEPEHLKKLHSIDK

SEQ ID NO: 367 - DNA, 1378 bp, Homo sapiens
  CDS (473)..(1330)
tgaaattggagagtcatacaaaatccagaatggagaaaagagagataaacagtgcttttggggtaaaatccaggtataggtatttgggcccactctatgtcatctatacatattatcatattagaatcattcttctcttcactcaggctcctgaccttgacctctttccaggtgcatttaactccctttcctcaggttctctaagagttgcctgacacttgcccaggtcccctgaataaaatacaggtaaatcagtgcataagaagctttatacagtgatctcagacttgtgaccaagagcccctctgcaccattgatagacagtggccgtgcccaccaggaggatgggcaatcacactgcagtgagcctattccttctgtggggattttccagtttttcagacctgcagagtctactttttgtggtgattctcttctacatgtgaccatcctagctgcaaacgtgtccataatgggggccatcaagctcagccacaaccttcacactcctatgtactttttcctctgtggcctgtccttttcagaaacttgtaccactgtggtagtaatccctcgcatgttggtggactttctatcagagagcaagaccatttctcttcctgagtgtgccacacagatgtttttctttctgggctttgcatccaacaactgtttcatcatggccgctatgtcctacgaccgctacacggccatccacaacccactgcagtaccacacccttatgacaagaaagatctgcttgcagatgatgatggcttcttggatggttgggttcctgttttctctgtgcatcatcgtcactgtattcaacttgtctctttgcgacttgaacactatccagcactatttctgtgatatctcaccagtggtctcccttgcttgtaattacactttctatcatgaaatggctatttttgtgctctctgcctttgtgttggtaggcagctgtattttaattatgatttcctatgtcttcattgtgttcatagtcataaagatgccctctgcaaaggggaggtctaaggccttctcaacttgctcctcccacctcactgttgtgtccatacactatggatttgcttgctttgtctatttgaggcccaagaacagcaactccttcgatgaagacatgccgacggccatgatatatacaatactgatgcctctgcttaaccccatcgtgtacagtctgagaaacaaagaaatgcagatagccctaagaaaaacactaggcagtgtatttggggttttccctcagaagacaaaaaaagagcctgaacatttaaaaaaattacacagcattgataaataaaggtgagaaaagcgaaaaaaaaaaaaaaaaaaaaaaaaaaaaggg

SEQ ID NO: 368 - protein, 286 aa, Homo sapiens; identical to SEQ ID NO: 364

SEQ ID NO: 369 - DNA, 1378 bp, Homo sapiens
  CDS (473)..(1330)
tgaaattggagagtcatacaaaatccagaatggagaaaagagagataaacagtgcttttggggtaaaatccaggtataggtatttgggcccactctatgtcatctatacatattatcatattagaatcattcttctcttcactcaggctcctgaccttgacctctttccaggtgcatttaactccctttcctcaggttctctaagagttgcctgacacttgcccaggtcccctgaataaaatacaggtaaatcagtgcataagaagctttatacagtgatctcagacttgtgaccaagagcccctctgcaccattgatagacagtggccgtgcccaccaggaggatgggcaatcacactgcagtgagcctattccttctgtggggattttccagtttttcagacctgcagagtctactttttgtggtgattctcttctacatgtgaccatcctagctgcaaacgtgtccataatgggggccatcaagctcagccacaaccttcacactcctatgtactttttcctctgtggcctgtccttttcagaaacttgtaccactgtggtagtaatccctcgcatgttggtggactttctatcagagagcaagaccatttctcttcctgagtgtgccacacagatgtttttctttctgggctttgcatccaacaactgtttcatcatggccgctatgtcctacgaccgctacacggccatccacaacccactgcagtaccacacccttatgacaagaaagatctgcttgcagatgatgatggcttcttggatggttgggttcctgttttctctgtgcatcatcgtcactgtattcaacttgtctctttgcgacttgaacactatccagcactatttctgtgatatctcaccagtggtctcccttgcttgtaattacactttctatcatgaaatggctatttttgtgctctctgcctttgtgttggtgggcagctgtattttaattatgatttcctatgtcttcattgtgttcatagtcataaagatgccctctgcaaaggggaggtctaaggccttctcaacttgctcctcccacctcactgttgtgtccatacactatggatttgcttgctttgtctatttgaggcccaagaacagcaactccttcgatgaagacatgccgacggccatgatatatacaatactgatgcctctgcttaaccccatcgtgtacagtctgagaaacaaagaaatgcagatagccctaagaaaaacactaggcagtgtatttggggttttccctcagaaggcaaaaaaagagcctgaacatttaaaaaaattacacagcattgataaataaaggtgagaaaagcgaaaaaaaaaaaaaaaaaaaaaaaaaaaaggg

SEQ ID NO: 370 - protein, 286 aa, Homo sapiens
MGAIKLSHNLHTPMYFFLCGLSFSETCTTVVVIPRMLVDFLSESKTISLPECATQMFFFLGFASNNCFIMAAMSYDRYTAIHNPLQYHTLMTRKICLQMMMASWMVGFLFSLCIIVTVFNLSLCDLNTIQHYFCDISPVVSLACNYTFYHEMAIFVLSAFVLVGSCILIMISYVFIVFIVIKMPSAKGRSKAFSTCSSHLTVVSIHYGFACFVYLRPKNSNSFDEDMPTAMIYTILMPLLNPIVYSLRNKEMQIALRKTLGSVFGVFPQKAKKEPEHLKKLHSIDK

SEQ ID NO: 371 - DNA, 1072 bp, Homo sapiens
  CDS (12)..(1046)
ttaacattttaatgtgctgttctcatttgggttcatttagtcagcagctacttcgtctcatgaattccctgaaggacgggaatcacaccgctctgacggggttcatcctattgggcttaacagatgatccaatccttcgagtcatcctcttcatgatcatcctatgcatctacctggtaaccatatctggtaatctcagcataattattcttatcagaatttcttctcagctccatcatcctatgtatttctttctgagccacttggcttttgctgacatggcctattcatcttctgtcacacccaacatgcttgtaaacttcctggtggagagaaatacagtctcctaccttggatgtgccatccagcttggttcagcggctttctttgcaacagtcgaatgcgtctttctggctgccatggcctatgaccgctttgtggcaatttgcagtccactgctttattcaaccaaaatgtccacacaagtcagtgtccagctactcttagtagtttacatagctggttttctcattgctgtctcctatactacttccttctattttttactcttctgtggaccaaatcaagtcaatcattttttctgtgatttcgctcccttacttgaactctcctgttctgatatcagtgtctccacagttgttctctcattttcttctggatccatcattgtggtcactgtgtgtgtcatagccgtctgctacatctatatcctcatcaccatcctgaagatgcgctccactgaggggcaccacaaggccttctccacctgcacttcccacctcactgtggttaccctgttctatgggaccattaccttcatttatgtgatgcccaattttagctactcaactgaccagaacaaggtggtgtctgtgttgtacacagtggtgattcccatgttgaaccccttgatctacagcctcaggaacaaggagattaagggggctctgaagagagagcttgttagaaaaatactttctcatgatgcttgttattttagtagaacttcaaataatgatattacatagaaccctatctcttctcttgagaa

SEQ ID NO: 372 - protein, 345 aa, Homo sapiens
MCCSHLGSFSQQLLRLMNSLKDGNHTALTGFILLGLTDDPILRVILFMIILCIYLVTISGNLSIIILIRISSQLHHPMYFFLSHLAFADMAYSSSVTPNMLVNFLVERNTVSYLGCAIQLGSAAFFATVECVFLAAMAYDRFVAICSPLLYSTKMSTQVSVQLLLVVYIAGFLIAVSYTTSFYFLLFCGPNQVNHFFCDFAPLLELSCSDISVSTVVLSFSSGSIIVVTVCVIAVCYIYILITILKMRSTEGHHKAFSTCTSHLTVVTLFYGTITFIYVMPNFSYSTDQNKVVSVLYTVVIPMLNPLIYSLRNKEIKGALKRELVRKILSHDACYFSRTSNNDIT

SEQ ID NO: 373 - DNA, 1050 bp, Homo sapiens
ttctcaagagaagagatagggttctatgtaatatcattatttgaagttctactaaaataacaagcatcatgagaaagtatttttctaacaagctctctcttcagagcccccttaatctccttgttcctgaggctgtagatcagggggttcaacatgggaatcaccactgtgtacaacacagacaccaccttgttctggtcagttgagtagctaaaattgggcatcacataaatgaaggtaatggtcccatagaacagggtaaccacagtgaggtgggaagtgcaggtggagaaggccttgtggtgcccctcagtggagcgcatcttcaggatggtgatgaggatatagatgtagcagacggctatgacacacacagtgaccacaatgatggatccagaagaaaatgagagaacaactgtggagacactgatatcagaacaggagagttcaagtaagggagcgaaatcacagaaaaaatgattgacttgatttggtccacagaagagtaaaaatagaaggaagtagtataggagacagcaatgagaaaaccagctatgtaaactactaagagtagctggacactgacttgtgtggacattttggttgaataaagcagtggactgcaaattgccacaaagcggtcataggccatggcagccagaaggacgcattcgactgttgcaaagaaagccgctgaaccaagctggatggcacatccaaggtaggagactgtatttctctccaccaggaagtttacaagcatgttgggtgtgacagaagatgaataggccatgtcagcaaaagccaagtggctcagaaagaaatacataggatgatggagctgagaagaaattctgataagaataattatgctgagattaccagataggatgatcatgaagaggatgactcgaaggattggatcatctgttaagcccaataggatgaaccccgtcagagcggtgtgattcccgtccttcagggaattcatgagacgaagtagctgctgactaaatgaaccctaatgagaacagcacattaaaatgttaa

SEQ ID NO: 374 - protein, 338 aa, Homo sapiens
MCCSHLGSFSQQLLRLMNSLKDGNHTALTGFILLGLTDDPILRVILFMIILCGNLSIIILIRISSQLHHPMYFFLSHLAFADMAYSSSVTPNMLVNFLVERNTVSYLGCAIQLGSAAFFATVECVFLAAMAYDRFVAICSPLLYSTKMSTQVSVQLLLVVYIAGFLIAVSYTTSFYFLLFCGPNQVNHFFCDFAPLLELSCSDISVSTVVLSFSSGSIIVVTVCVIAVCYIYILITILKMRSTEGHHKAFSTCTSHLTVVTLFYGTITFIYVMPNFSYSTDQNKVVSVLYTVVIPMLNPLIYSLRNKEIKGALKRELVRKILSHDACYFSRTSNNDIT

SEQ ID NO: 375 - DNA, 1070 bp, Homo sapiens
  CDS (27)..(1040)
gaagccatcaaatttataacattttaatgtgctgttctcatttgggttcatttagtcagcagctacttcgtctcatgaattccctgaaggacgggaatcacaccgctctgacggggttcatcctattgggcttaacagatgatccaatccttcgagtcatcctcttcatgatcatcctatctggtaatctcagcataattattcttatcagaatttcttctcagctccatcatcctatgtatttctttctgagccacttggcttttgctgacatggcctattcatcttctgtcacacccaacatgcttgtaaacttcctggtggagagaaatacagtctcctaccttggatgtgccatccagcttggttcagcggctttctttgcaacagtcgaatgcgtccttctggctgccatggcctatgaccgctttgtggcaatttgcagtccactgctttattcaaccaaaatgtccacacaagtcagtgtccagctactcttagtagtttacatagctggttttctcattgctgtctcctatactacttccttctattttttactcttctgtggaccaaatcaagtcaatcattttttctgtgatttcgctcccttacttgaactctcctgttctgatatcagtgtctccacagttgttctctcattttcttctggatccatcattgtggtcactgtgtgtgtcatagccgtctgctacatctatatcctcatcaccatcctgaagatgcgctccactgaggggcaccacaaggccttctccacctgcacttcccacctcactgtggttaccctgttctatgggaccattaccttcatttatgtgatgcccaattttagctactcaactgaccagaacaaggtggtgtctgtgttgtacacagtggtgattcccatgttgaaccccctgatctacagcctcaggaacaaggagattaagggggctctgaagagagagcttgttagaaaaatactttctcatgatgcttgttattttagtagaacttcaaataatgatattacatagaaccctatctcttctcttgagaatact

SEQ ID NO: 376 - protein, 338 aa, Homo sapiens
MCCSHLGSFSQQLLRLMNSLKDGNHTALTGFILLGLTDDPILRVILFMIILSGNLSIIILIRISSQLHHPMYFFLSHLAFADMAYSSSVTPNMLVNFLVERNTVSYLGCAIQLGSAAFFATVECVLLAAMAYDRFVAICSPLLYSTKMSTQVSVQLLLVVYIAGFLIAVSYTTSFYFLLFCGPNQVNHFFCDFAPLLELSCSDISVSTVVLSFSSGSIIVVTVCVIAVCYIYILITILKMRSTEGHHKAFSTCTSHLTVVTLFYGTITFIYVMPNFSYSTDQNKVVSVLYTVVIPMLNPLIYSLRNKEIKGALKRELVRKILSHDACYFSRTSNNDIT

SEQ ID NO: 377 - DNA, 1049 bp, Homo sapiens
  CDS (54)..(995)
  misc_feature (1040)..(1040): Wherein n may be a, c, g or t
  misc_feature (1041)..(1041): Wherein n may be a, c, g or t
  misc_feature (1042)..(1042): Wherein n may be a, c, g or t
  misc_feature (1043)..(1043): Wherein n may be a, c, g or t
  misc_feature (1044)..(1044): Wherein n may be a, c, g or t
  misc_feature (1045)..(1045): Wherein n may be a, c, g or t
  misc_feature (1046)..(1046): Wherein n may be a, c, g or t
  misc_feature (1047)..(1047): Wherein n may be a, c, g or t
  misc_feature (1048)..(1048): Wherein n may be a, c, g or t
  misc_feature (1049)..(1049): Wherein n may be a, c, g or t
atattttgctttggcaggaacaattctcttcaacccttccattaaaaggaattatgatgatggttttaaggaatctgagcatggagcccacctttgcccttttaggtttcacagattacccaaagcttcagattcctctcttccttgtgtttctgctcatgtatgttatcacagtggtaggaaaccttgggatgatcataataatcaagattaaccccaaatttcacactcctatgtactttttccttagtcacctctcttttgttgatttttgttactcttccattgtcactcccaagctgcttgagaacttggtaatggcagataaaagcatcttctactttagctgcatgatgcagtacttcctgtcctgcactgctgtggtgacagagtctttcttgctggcagtgatggcctatgaccgctttgtggccatctgcaatcctctgctttatacagtggccatgtcacagaggctctgtgccctgctggtggctgggtcatatctctggggcatgtttggccccttggtactcctttgttatgctctccggttaaacttctctggacctaatgtaatcaaccacttcttttgtgagtatactgctctcatctctgtgtctggctctgatatactcatcccccacctgctgcttttcagcttcgccaccttcaatgagatgtgtacactactgatcatcctcacttcctatgttttcatttttgtgactgtactaaaaatccgttctgttagtgggcgccacaaagccttctccacctgggcctcccacctgactgctatcaccatcttccatgggaccatccttttcctttactgtgtacccaactccaaaaactctcggcaaacagtcaaagtggcctctgtattttacacagttgtcaaccccatgctgaaccctccgatctacagcctaaggaataaagacgtgaaggatgctttctggaagttaatacatacacaagttccatttcactgaaccagtctcaaaagttgttttcaatccaaatgaacaacccannnnnnnnnn

SEQ ID NO: 378 - protein, 314 aa, Homo sapiens
MMMVLRNLSMEPTFALLGFTDYPKLQIPLFLVFLLMYVITVVGNLGMIIIIKINPKFHTPMYFFLSHLSFVDFCYSSIVTPKLLENLVMADKSIFYFSCMMQYFLSCTAVVTESFLLAVMAYDRFVAICNPLLYTVAMSQRLCALLVAGSYLWGMFGPLVLLCYALRLNFSGPNVINHFFCEYTALISVSGSDILIPHLLLFSFATFNEMCTLLIILTSYVFIFVTVLKIRSVSGRHKAFSTWASHLTAITIFHGTILFLYCVPNSKNSRQTVKVASVFYTVVNPMLNPPIYSLRNKDVKDAFWKLIHTQVPFH

SEQ ID NO: 379 - DNA, 1039 bp, Homo sapiens
  CDS (54)..(995)
atattttgctttggcaggaacaattctcttcaacccttccattaaaaggaattatgatgatggttttaaggaatctgagcatggagcccacctttgcccttttaggtttcacagattacccaaagcttcagattcctctcttccttgtgtttctgctcatgtatgttatcacagtggtaggaaaccttgggatgatcataataatcaagattaaccccaaatttcacactcctatgtactttttccttagtcacctctcttttgttgatttttgttactcttccattgtcactcccaagctgcttgagaacttggtaatggcagataaaagcatcttctactttagctgcatgatgcagtacttcctgtcctgcactgctgtggtgacagagtctttcttgctggcagtgatggcctatgaccgctttgtggccatctgcaatcctctgctttatacagtggccatgtcacagaggctctgtgccctgctggtggctgggtcatatctctggggcatgtttggccccttggtactcctttgttatgctctccggttaaacttctctggacctaatgtaatcaaccacttcttttgtgagtatactgctctcatctctgtgtctggctctgatatactcatcccccacctgctgcttttcagcttcgccaccttcaatgagatgtgtacactactgatcatcctcacttcctatgttttcatttttgtgactgtactaaaaatccgttctgttagtgggcgccacaaagccttctccacctgggcctcccacctgactgctatcaccatcttccatgggaccatccttttcctttactgtgtacccaactccaaaaactctcggcaaacagtcaaagtggcctctgtattttacacagttgtcaaccccatgctgaaccctccgatctacagcctaaggaataaagacgtgaaggatgctttctggaagttaatacatacacaagttccatttcactgaaccagtctcaaaagttgttttcaatccaaatgaacaaccca

SEQ ID NO: 380 - protein, 314 aa, Homo sapiens; identical to SEQ ID NO: 378

SEQ ID NO: 381 - DNA, 1092 bp, Homo sapiens
  CDS (30)..(1046)
ccgggacagtcacctccagcagcatcctgatgttctggggacactggtgctggggggtcagtggggaagggctcctgggtcctcatgaccctctcccttgggtgagcacaaaacaccatggcactttggggtcttggaaacagactaaaggggatgtcaagtcctcattccttggagctgctgacgagtccagaatgggtcatgttttcttgccccgaccccagcacctcagggcagcggaaggtccagagagaggtcggggaccggggccgctccttgcatcctgggcttgtgtctgttgccccctggctggtgacttgcactctcctggagctggttcttgcagccgaggccgtcacggggctgggatgtcgctgctgcttctcttcgtggtgttgaccatttctcagacctccccccgcccctgcagggaggagttggaggcttgcgcgtttagagtgcaggtggggcagctgaggctctatgaggacgaccagcggacgaaggtggttgagatcgtccgtcacccccagtacaacgagagcctgtctgcccagggcggtgcggacatcgccctgctgaagctggaggccccggtgccgctgtctgagctcatccacccggtctcgctcccgtctgcctccctggacgtgccctcggggaagacctgctgggtgaccggctggggtgtcattggacgtggagaactactgccctggcccctcagcttgtgggaggcgacggtgaaggtcaggagcaacgtcctctgtaaccagacctgtcgccgccgctttccttccaaccacactgagcggtttgagcggctcatcaaggacgacatgctgtgtgccggggacgggaaccacggctcctggccaggcgacaacgggggccccctcctgtgcgggcggaattgcacctgggtccaggtggaggtggtgagctggggcaaattctgcggccttcgcggctatcccggcatgtacactcgcgtgacgagctacgtgtcctggatccgccagtacgtcccgccgttccccagacgctagctggggtgcagtggggtctgcatgatccaggagggcccgtctt

SEQ ID NO: 382 - protein, 339 aa, Homo sapiens
MFWGHWCWGVSGEGLLGPHDPLPWVSTKHHGTLGSWKQTKGDVKSSFLGAADESRMGHVFLPRPQHLRAAEGPERGRGPGPLLASWACVCCPLAGDLHSPGAGSCSRGRHGAGMSLLLLFVVLTISQTSPRPCREELEACAFRVQVGQLRLYEDDQRTKVVEIVRHPQYNESLSAQGGADIALLKLEAPVPLSELIHPVSLPSASLDVPSGKTCWVTGWGVIGRGELLPWPLSLWEATVKVRSNVLCNQTCRRRFPSNHTERFERLIKDDMLCAGDGNHGSWPGDNGGPLLCGRNCTWVQVEVVSWGKFCGLRGYPGMYTRVTSYVSWIRQYVPPFPRR

SEQ ID NO: 383 - DNA, 881 bp, Homo sapiens
  CDS (31)..(831)
gctctgggaagaccctcgtccgtccccctcatgagcccggcacggggcgtgagctggtgggcatcactgggggctgcgacgtcccggccaggaggcacccctggtagggaggagttggaggcttgcgcgtttagagtgcaggtggggcagctgaggctctatgaggacgaccagcggacgaaggtggttgagatcgtccgtcacccccagtacaacgagagcctgtctgcccagggcggtgcggacatcgccctgctgaagctggaggccccggtgccgctgtctgagctcatccacccggtctcgctcccgtctgcctcccgggacgtgccctcggggaagacctgctgggcctgggctccagacgcgtcctggatggcttcctgccgctgccgagacggatggccacaggccaggtggctcagagcagcaggaatgtactatctcacggctctgcaggcggaacgtccacactccaggcgtgggcaggaactactgccctggcccctcagcttgtgggaggcgacggtgaaggtcaggagcaacgtcctctgtaaccagacctgtcgccgccgctttccttccaaccacactgagcggtttgagcggctcatcaaggacgacatgctgtgtgccggggacgggaaccacggctcctggccaggcgacaacgggggccccctcctgtgcaggcggaattgcacctgggtccaggtggaggtggtgagctggggcaaattctgcggccttcgcggctatcccggcatgtacactcgcgtgacgagctacgtgtcctggatccgccagtacgtcccgccgttccccagacgctagctggggtgcagtggggtctgcatgatccaggagggcccgtctaagcg

SEQ ID NO: 384 - protein, 267 aa, Homo sapiens
MSPARGVSWWASLGAATSRPGGTPGREELEACAFRVQVGQLRLYEDDQRTKVVEIVRHPQYNESLSAQGGADIALLKLEAPVPLSELIHPVSLPSASRDVPSGKTCWAWAPDASWMASCRCRDGWPQARWLRAAGMYYLTALQAERPHSRRGQELLPWPLSLWEATVKVRSNVLCNQTCRRRFPSNHTERFERLIKDDMLCAGDGNHGSWPGDNGGPLLCRRNCTWVQVEVVSWGKFCGLRGYPGMYTRVTSYVSWIRQYVPPFPRR

SEQ ID NO: 385 - DNA, 819 bp, Homo sapiens
  CDS (1)..(819)
cgcaagcttatgagcccggcacggggcgtgagctggtgggcatcactgggggctgcgacgtctcggccaggaggcacccctggcagggaggagttggaggcttgcgcgtttagagtgcaggtggggcagctgaggttctatgaggacgaccagcggacgaaggtggttgagatcgtccgtcacccccagtacaacgagagcctgtctgcccagggcggtgcggacatcgccctgctgaagctggaggccccggtgccgctgtctgagctcatccacccggtctcgctcccgtctgcctcccgggacgtgccctcggggaagacctgctgggcctgggctccagacgcgtcctggatggcttcctgccgctgccgagacggatggccacaggccaggtggctcagagcagcaggaatgtactatctcacggctctgcaggcggaacgtccacactccaggcgtgggcaggaactactgccctggcccctcagcttgtgggaggcgacggtgaaggtcaggagcaacgtcctctgtaaccagacctgtcgccgccgctttccttccaaccacactgagcggtttgagcggctcatcaaggacgacatgctgtgtgccggggacgggaaccacggctcctggccaggcgacaacgggggccccctcctgtgcaggcggaattgcacctgggtccaggtggaggtggtgagctggggcaaactctgcggccttcgcggctatcccggcatgtacacccgcgtgacgagctacgtgtcctggatccgccagtacgtcccgccgttccccagacgcgtcgacgcg

SEQ ID NO: 386 - protein, 273 aa, Homo sapiens
RKLMSPARGVSWWASLGAATSRPGGTPGREELEACAFRVQVGQLRFYEDDQRTKVVEIVRHPQYNESLSAQGGADIALLKLEAPVPLSELIHPVSLPSASRDVPSGKTCWAWAPDASWMASCRCRDGWPQARWLRAAGMYYLTALQAERPHSRRGQELLPWPLSLWEATVKVRSNVLCNQTCRRRFPSNHTERFERLIKDDMLCAGDGNHGSWPGDNGGPLLCRRNCTWVQVEVVSWGKLCGLRGYPGMYTRVTSYVSWIRQYVPPFPRRVDA

SEQ ID NO: 387 - DNA, 858 bp, Homo sapiens
  CDS (1)..(855)
atgctgtggctactgctcctgaccctcccctgcctgatgggctctgtgcccaggaacccaggcgagggcacggggcgtgagctggtgggcatcactgggggctgcgacgtctcggccaggaggcacccctggcaggtcagcctgaggttctacagcatgaagaagggtctgtgggagcccatctgtgggggctccctcatccacccagagtgggtgctgaccgccgcccactgccttttggaggagttggaggcttgcgcgtttagagtgcaggtggggcagctgaggctctatgaggacgaccagcggacgaaggtggttgagatcgtccgtcacccccagtacaacgagagcctgtctgcccagggcggtgcggacatcgccctgctgaagctggaggccccggtgccgctgtctgagctcatccacccggtctcgctcccgtctgcctccctggacgtgccctcggggaagacctgctgggtgaccggctggggtgtcattggacgtggagaactactgccctggcccctcagcttgtgggaggcgacggtgaaggtcaggagcaacgtcctctgtaaccagacctgtcgccgccgctttccttccaaccacactgagcggtttgagcggctcatcaaggacgacatgctgtgtgccggggacgggaaccacggctcctggccaggcgacaacgggggccccctcctgtgcaggcggaattgcacctgggtccaggtggaggtggtgagctggggcaaactctgcggccttcgcggctatcccggcatgtacacccgcgtgacgagctacgtgtcctggatccgccagtacgtcccgccgttccccagacgctag

SEQ ID NO: 388 - protein, 285 aa, Homo sapiens
MLWLLLLTLPCLMGSVPRNPGEGTGRELVGITGGCDVSARRHPWQVSLRFYSMKKGLWEPICGGSLIHPEWVLTAAHCLLEELEACAFRVQVGQLRLYEDDQRTKVVEIVRHPQYNESLSAQGGADIALLKLEAPVPLSELIHPVSLPSASLDVPSGKTCWVTGWGVIGRGELLPWPLSLWEATVKVRSNVLCNQTCRRRFPSNHTERFERLIKDDMLCAGDGNHGSWPGDNGGPLLCRRNCTWVQVEVVSWGKLCGLRGYPGMYTRVTSYVSWIRQYVPPFPRR

SEQ ID NO: 389 - DNA, 660 bp, Homo sapiens
  CDS (1)..(660)
tcactgggggctgcgacgtctcggccaggaggcacccctggcagggaggagttggaggcttgcgcgtttagagtgcaggtggggcagctgaggctctatgaggacgaccagcggacgaaggtggttgagatcgtccgtcacccccagtacaacgagagcctgtctgcccagggcggtgcggacatcgccctgctgaagctggaggccccggtgccgctgtctgagctcatccacccggtctcgctcccgtctgcctcccgggacgtgccctcggggaagacctgctgggtgaccggctggggtgtcattggacgtggagaactactgccctggcccctcagcttgtgggaggcgacggtgaaggtcaggagcaacgtcctctgtaaccagacctgtcgccgccgctttccttccaaccacactgagcggtttgagcggctcatcaaggacgacatgctgtgtgccggggacgggaaccacggctcctggccaggcgacaacgggggccccctcctgtgcaggcggaattgcacctgggtccaggtggaggtggtgagctggggcaaactctgcggccttcgcggctatcccggcatgtacacccgcgtgacgagctacgtgtcctggatccgccagtacgtcccgccgttccccagacgc

SEQ ID NO: 390 - protein, 220 aa, Homo sapiens
SLGAATSRPGGTPGREELEACAFRVQVGQLRLYEDDQRTKVVEIVRHPQYNESLSAQGGADIALLKLEAPVPLSELIHPVSLPSASRDVPSGKTCWVTGWGVIGRGELLPWPLSLWEATVKVRSNVLCNQTCRRRFPSNHTERFERLIKDDMLCAGDGNHGSWPGDNGGPLLCRRNCTWVQVEVVSWGKLCGLRGYPGMYTRVTSYVSWIRQYVPPFPRR

SEQ ID NO: 391 - DNA, 2847 bp, Homo sapiens
  CDS (1)..(2844)
atggtcagcaaggggggagttgctgcagagccagagccacactattgtgaggacagtgaaagaggccccaacaccctcacaggtccgggcagccttcctagaggaggtggcattgaggtgggcatggagtttccgggatgcagcggtgaagggtgcgtgaagccccatgaggaggcggcccgggagggggcgggcagaggcaagagggctgtgccgggacccaagcgacggcagcaggggtcagcagaggggcctgcggcggggtggacgctggagcaggagaccaggggagatgtcttagaggataaaaatgagcgggcagatgaagagatactcaggctggcaccagggaaaggcaggctcccaatagacagcaaacacctgaaaccggtgatcagcagcttcccggtaagatctcaggagctgggcgagggggctggagcaggcacactaagaggcaaaatggcagagtttaactggtctatggccttcaagggacctgcggctggtcatgaagagcgcctcaactctgtgtccagcagggccaagaagggcattggctgggatgtcgctgctgcttctcttcgtggtgttgaccatttctcagacctccccccgcccctgcaggtcagggaggagttggaggcttgcgcgtttagagtgcaggtggggcagctgaggctctatgaggacgaccagcggacgaaggtggttgagatcgtccgtcacccccagtacaacgagagcctgtctgcccagggcggtgcggacatcgccctgctgaagctggaggccccggtgccgctgtctgagctcatccacccggtctcgctcccgtctgcctccctggacgtgccctcggggaagacctgctgggtgaccggctggggtgtcattggacgtggagaactactgccctggcccctcagcttgtgggaggcgacggtgaaggtcaggagcaacgtcctctgtaaccagacctgtcgccgccgctttccttccaaccacactgagcggtttgagcggctcatcaaggacgacatgctgtgtgccggggacgggaaccacggctcctggccaggcgacaacgggggccccctcctgtgcaggcggaattgcacctgggtccaggtggaggtggtgagctggggcaaactctgcggccttcgcggctatcccggcatgtacacccgcgtgacgagctacgtgtcctggatccgccagccatgcccctcagctcagacccctgctgtggtccgaagatttgtgctccccccaaatccagatgttgaagccctaactcccagtgtgatgggatcaggagcgccgctgcccccggcccccgacctgcaagaggccgaggtccccatcatgaggacccgagcttgcgagaggatgtatcacaaaggccccactgcccacggccaggtcaccatcatcaaggctgccatgccgtgtgcagggaggaaggggcagggttcctgccaggccgctctgaggacggaggacctcaccccaaccacacccaacacggaggtgtctccacgtgcagaccccaggctgagccagccggaggacatctggccagagtgggcttggccagttgtggtgggcaccaccatgctgctgctgctgctgttcctggctgtctcctccctggggagctgtagcactgggagtccagctcccgtccccgagaatgacctggtgggcattgtggggggccacaacaccccaggggaagtggtcgtggcagtgggtgctgaccgccgctcactgcattttccggaaggacaccgacccgtccacctaccggattcacaccagggatgtgtatctgtacgggggccgggggctgctgaatgtcagccagatcgtcgtccacccaactactctgtcttcttcctgggggcagacatcgccctgctgaagctggccaccagttccctggagttcactgacagtgacaactgctggaacacaggctggggcatggtcggcttgttggatatgctgccgcctccttaccgcccgcagcaggtgaaggtcctcacactgagcaatgcagactgtgagcggcagacctacgatgcttttcctggtgctggagacagaaagttcatccaggatgacatgatctgtgccggccgcacgggccgccgcacctggaagggtgactcaggcggccccctggtctgcaagaagaagggtacctggctccaggcgggagtagtgagctggggattttacagtgatcggcccagcattggcgtctacacacgcccagagaccagctggcagggtgccaaccatgcagacgcccagagaccagctggcagggtgccaaccatgcagaggcccagagacatgggccagggccaggagtgggtctgcaggcccttcacccacgtcacctgctacccgacggccatccccaggcccttcacccatgtcacctgctacctgatggctgtccccagcaccctcacccacgtcacctgctacccgacggccgtccccaggcccttcacccatgtcacctgctacctgatggctgtccccagcaccctcacccacatcacctgctacatgatggccgtccccaggccctttacccacatcacctgctacccaatggctgtccccagcacccttacccacgtcacctgccacccgacggccatccccaggcccttcacccacatcacctgctacacgatggccatccccaggccttcaaccacgccacctgctacacgacggccatccccagcaccctcacccacgtcacctgctacacgatggccgtccccaggcccatcacccatgtcacctgctacacgatag

SEQ ID NO: 392 - protein, 948 aa, Homo sapiens [sequence omitted]

SEQ ID NO: 393 - DNA, 660 bp, Homo sapiens; identical to SEQ ID NO: 389
  CDS (1)..(660)

SEQ ID NO: 394 - protein, 220 aa, Homo sapiens; identical to SEQ ID NO: 390

SEQ ID NO: 395 - DNA, 672 bp, Homo sapiens
  CDS (7)..(666)
agatcttcactgggggctgcgacgtctcggccaggaggcacccctggcagggaggagttggaggcttgcgcgtttagagtgcaggtggggcagctgaggctctatgaggacgaccagcggacgaaggtggttgagatcgtccgtcacccccagtacaacgagagcctgtctgcccagggcggtgcggacatcgccctgctgaagctggaggccccggtgccgctgtctgagctcatccacccggtctcgctcccgtctgcctccctggacgtgccctcggggaagacctgctgggtgaccggctggggtgtcattggacgtggagaactactgccctggcccctcagcttgtgggaggcgacggtgaaggtcaggagcaacgtcctctgtaaccagacctgtcgccgccgctttccttccaaccacactgagcggtttgagcggctcatcaaggacgacatgctgtgtgccggggacgggaaccacggctcctggccaggcgacaacgggggccccctcctgtgcaggcggaattgcacctgggtccaggtggaggtggtgagctggggcaaactctgcggccttcgcggctatcccggcatgtacacccgcgtgacgagctacgtgtcctggatccgccagtacgtcccgccgttccccagacgcctcgag

SEQ ID NO: 396 - protein, 220 aa, Homo sapiens
SLGAATSRPGGTPGREELEACAFRVQVGQLRLYEDDQRTKVVEIVRHPQYNESLSAQGGADIALLKLEAPVPLSELIHPVSLPSASLDVPSGKTCWVTGWGVIGRGELLPWPLSLWEATVKVRSNVLCNQTCRRRFPSNHTERFERLIKDDMLCAGDGNHGSWPGDNGGPLLCRRNCTWVQVEVVSWGKLCGLRGYPGMYTRVTSYVSWIRQYVPPFPRR

SEQ ID NO: 397 - DNA, 1171 bp, Homo sapiens; identical to SEQ ID NO: 181
  CDS (187)..(804)

SEQ ID NO: 398 - protein, 206 aa, Homo sapiens; identical to SEQ ID NO: 182

SEQ ID NO: 399 - DNA, 843 bp, Homo sapiens; identical to SEQ ID NO: 183
  CDS (26)..(835)

SEQ ID NO: 400 - protein, 270 aa, Homo sapiens; identical to SEQ ID NO: 184

SEQ ID NO: 401 - DNA, 964 bp, Homo sapiens; identical to SEQ ID NO: 179
  CDS (67)..(654)

SEQ ID NO: 402 - protein, 196 aa, Homo sapiens; identical to SEQ ID NO: 180

SEQ ID NO: 403 - DNA, 948 bp, Homo sapiens
  CDS (61)..(930)
tgaccctcccctgcctgatgggctctgtgcccaggaacccaggcgagtccgccccacccaatgcccctgctgcccagccggtctctcctggtgcccctgagctctgggaagaccctcgtccgtccccctcatgagcccggcacggggcgtgagctggtgggcatcactgggggctgcgacgtctcggccaggaggcacccctggcaggtcagcctgaggttctacagcatgaagaagggtctgtgggagcccatctgtgggggctccctcatccacccagagtgggtgctgaccgccgcccactgccttgggcctgaggagttggaggcttgcgcgtttagagtgcaggtggggcagctgaggctctatgaggacgaccagcggacgaaggtggttgagatcgtccgtcacccccagtacaacgagagcctgtctgcccagggcggtgcggacatcgccctgctgaagctggaggccccggtgccgctgtctgagctcatccacccggtctcgctcccgtctgcctccctggacgtgccctcggggaagacctgctgggtgaccggctggggtgtcattggacgtggagaactactgccctggcccctcagcttgtgggaggcgacggtgaaggtcaggagcaacgtcctctgtaaccagacctgtcgccgccgctttccttccaaccacactgagcggtttgagcggctcatcaaggacgacatgctgtgtgccggggacgagcgccatctctccccacagggcgacaacgggggccccctcctgtgcaggcggaattgcacctgggtccaggtggaggtggtgagctggggcaaactctgcggccttcgcggctatcccggcatgtacacccgcgtgacgagctacgtgtcctggatccgccagtacgtcccgccgttccccagacgctagctggggtgcagtggg

SEQ ID NO: 404 - protein, 290 aa, Homo sapiens
MPLLPSRSLLVPLSSGKTLVRPPHEPGTGRELVGITGGCDVSARRHPWQVSLRFYSMKKGLWEPICGGSLIHPEWVLTAAHCLGPEELEACAFRVQVGQLRLYEDDQRTKVVEIVRHPQYNESLSAQGGADIALLKLEAPVPLSELIHPVSLPSASLDVPSGKTCWVTGWGVIGRGELLPWPLSLWEATVKVRSNVLCNQTCRRRFPSNHTERFERLIKDDMLCAGDERHLSPQGDNGGPLLCRRNCTWVQVEVVSWGKLCGLRGYPGMYTRVTSYVSWIRQYVPPFPRR

SEQ ID NO: 405 - DNA, 843 bp, Homo sapiens
  CDS (11)..(835)
tgagagataaatgggctcccagagatgccagggaggaggccccggcacggggcgtgagctggtgggcatcactgggggctgcgacgtctcggccaggaggcacccctggcaggtcagcctgaggttctacagcatgaagaagggtctgtgggagcccatctgtgggggctccctcatccacccagagtgggtgctgaccgccgcccactgccttggcagggaggagttggaggcttgcgcgtttagagtgcaggtggggcagctgaggctctatgaggacgaccagcggacgaaggtggttgagatcgtccgtcacccccagtacaacgagagcctgtctgcccagggcggtgcggacatcgccctgctgaagctggaggccccggtgccgctgtctgagctcatccacccggtctcgctcccgtctgcctcccggcctgggctccagacgcgtcctggatggcttcctgccgctgccgagacggatgggcaggaactactgccctggcccctcagcttgtgggaggcgacggtgaaggtcaggagcaacgtcctctgtaaccagacctgtcgccgccgctttccttccaaccacactgagcggtttgagcggctcatcaaggacgacatgctgtgtgccggggacgggaaccacggctcctggccaggcgacaacgggggccccctcctgtgcaggcggaattgcacctgggtccaggtggaggtggtgagctggggcaaactctgcggccttcgcggctatcccggcatgtacacccgcgtgacgagctacgtgtcctggatccgccagtacgtcccgccgttccccagacgctagctggg

SEQ ID NO: 406 - protein, 275 aa, Homo sapiens
MGSQRCQGGGPGTGRELVGITGGCDVSARRHPWQVSLRFYSMKKGLWEPICGGSLIHPEWVLTAAHCLGREELEACAFRVQVGQLRLYEDDQRTKVVEIVRHPQYNESLSAQGGADIALLKLEAPVPLSELIHPVSLPSASRPGLQTRPGWLPAAAETDGQELLPWPLSLWEATVKVRSNVLCNQTCRRRFPSNHTERFERLIKDDMLCAGDGNHGSWPGDNGGPLLCRRNCTWVQVEVVSWGKLCGLRGYPGMYTRVTSYVSWIRQYVPPFPRR

SEQ ID NO: 407 - DNA, 870 bp, Homo sapiens
  CDS (43)..(867)
atctggccagagtgggcttggccagttgtggtgggcaccaccatgctgctgctgctgctgttcctggctgtctcctccctggggagctgtagcactgggagtccagctcccgtccccgagaatgacctggtgggcattgtggggggccacaacacccaggggaagtggtcgtggcaggtcagcctgaggatctatagctaccactgggcctcctgggtgcccatctgcgggggctccctcatccacccccagtgggtgctgaccgccgctcactgcattttccggaaggacaccgacccgtccacctaccggattcacaccagggatgtgtatctgtacgggggccgggggctgctgaatgtcagccagatcgtcgtccaccccaactactctgtcttcttcctgggggcagacatcgccctgctgaagctggccaccagtgtgagaacaacaaacactctcgcggcagtcgccctgccgtcattgtccctggagttcactgacagtgacaactgctggaacacaggctggggcatggtcggcttgttggatatgctgccgcctccttaccgcccgcagcaggtgaaggtcctcacactgagcaatgcagactgtgagcggcagacctacgatgcttttcctggtgctggagacagaaagttcatccaggatgacatgatctgtgccggccgcacgggccgccgcacctggaagggtgactcaggcggccccctggtctgcaagaagaagggtacctggctccaggcgggagtagtgagctggggattttacagtgatcggcccagcattggcgtctacacgtgggtccagacctatgtgccctggatcctgcagcaaatgcacctctaa

SEQ ID NO: 408 - protein, 275 aa, Homo sapiens
MLLLLLFLAVSSLGSCSTGSPAPVPENDLVGIVGGHNTQGKWSWQVSLRIYSYHWASWVPICGGSLIHPQWVLTAAHCIFRKDTDPSTYRIHTRDVYLYGGRGLLNVSQIVVHPNYSVFFLGADIALLKLATSVRTTNTLAAVALPSLSLEFTDSDNCWNTGWGMVGLLDMLPPPYRPQQVKVLTLSNADCERQTYDAFPGAGDRKFIQDDMICAGRTGRRTWKGDSGGPLVCKKKGTWLQAGVVSWGFYSDRPSIGVYTWVQTYVPWILQQMHL

SEQ ID NO: 409 - DNA, 1028 bp, Homo sapiens
  CDS (18)..(974)
tgcagaggggatatcacatggaaaaagccaatgagacctcccctgtgatggggttcgttctcctggggctctctgcccacccagagctggaaaagacattcttcgtgctcatcctgctgatgtacctcgtgatcctgctgggcaatggggtcctcatcctggtgaccatccttgactcccgcctgcacacgcccatgtacttcttcctagggaacctctccttcctggacatctgcttcactacctcctcagtcccactggtcctggacagctttttgactccccaggaaaccatctccttctcagcctgtgctgtgcagatggcactctcctttgccatggcaggaacagagtgcttgctcctgagcatgatggcatttgatcgctatgtggccatctgcaacccccttaggtactccgtgatcatgagcaaggctgcctacatgcccatggctgccagctcctgggctattggtggtgctgcttccgtggtacacacatccttggcaattcagctgcccttctgtggagacaatgtcatcaaccacttcacctgtgagattctggctgttctaaagttggcctgtgctgacatttccatcaatgtgatcagcatggaggtgacgaatgtgatcttcctaggagtcccggttctgttcatctctttctcctatgtcttcatcatcaccaccatcctgaggatcccctcagctgaggggaggaaaaaggtcttctccacctgctctgcccacctcaccgtggtgatcgtcttctacgggaccttattcttcatgtatgggaagcctaagtctaaggactccatgggagcagacaaagaggatctttcagacaaactcatcccccttttctatggggtggtgaccccgatgctcaaccccatcatctatagcctgaggaacaaggatgtgaaggctgctgtgaggagactgctgagaccaaaaggcttcactcagtgatggtggaagggtcctctgtgattgtcacccacatggaagtaaggaatcaca

SEQ ID NO: 410 - protein, 319 aa, Homo sapiens [sequence omitted]

SEQ ID NO: 411 - DNA, 1031 bp, Homo sapiens
  CDS (22)..(978)
tgatggcagaggggatatcacatggaaaaagccaatgagacctcccctgtgatggggttcgttctcctgaggctctctgcccacccagagctggaaaagacattcttcgtgctcatcctgctgatgtacctcgtgatcctgctgggcaatggggtcctcatcctggtgaccatccttgactcccgcctgcacacgcccatgtacttcttcctagggaacctctccttcctggacatctgcttcactacctcctcagtcccactggtcctggacagctttttgactccccaggaaaccatctccttctcagcctgtgctgtgcagatggcactctcctttgccatggcaggaacagagtgcttgctcctgagcatgatggcatttgatcgctatgtggccatctgcaacccccttaggtactccgtgatcatgagcaaggctgcctacatgcccatggctgccagctcctgggctattggtggtgctgcttccgtggtacacacatccttggcaattcagctgcccttctgtggagacaatgtcatcaaccacttcacctgtgagattctggctgttctaaagttggcctgtgctgacatttccatcaatgtgatcagcatggaggtgacgaatgtgatcttcctaggagtcccggttctgttcatctctttctcctatgtcttcatcatcaccaccatcctgaggatcccctcagctgaggggaggaaaaaggtcttctccacctgctctgcccacctcaccgtggtgatcgtcttctacgggaccttattcttcatgtatgggaagcctaagtctaaggactccatgggagcagacaaagaggatctttcagacaaactcatcccccttttctatggggtggtgaccccgatgctcaaccccatcatctatagcctgaggaacaaggatgtgaaggctgctgtgaggagactgctgagaccaaaaggcttcactcagtgatggtggaagggtcctctgtgattgtcacccacatggaagtaaggaatcac

SEQ ID NO: 412 - protein, 319 aa, Homo sapiens
MEKANETSPVMGFVLLRLSAHPELEKTFFVLILLMYLVILLGNGVLILVTILDSRLHTPMYFFLGNLSFLDICFTTSSVPLVLDSFLTPQETISFSACAVQMALSFAMAGTECLLLSMMAFDRYVAICNPLRYSVIMSKAAYMPMAASSWAIGGAASVVHTSLAIQLPFCGDNVINHFTCEILAVLKLACADISINVISMEVTNVIFLGVPVLFISFSYVFIITTILRIPSAEGRKKVFSTCSAHLTVVIVFYGTLFFMYGKPKSKDSMGADKEDLSDKLIPLFYGVVTPMLNPIIYSLRNKDVKAAVRRLLRPKGFTQ

SEQ ID NO: 413 - DNA, 1028 bp, Homo sapiens
  CDS (18)..(974)
tgcagaggggatatcacatggaaaaagccaatgagacctcccctgtgatggggttcgttctcctgaggctctctgcccacccagagctggaaaagacattcttcgtgctcatcctgctgatgtacctcgtgatcctgctgggcaatggggtcctcatcctggtgaccatccttgactcccgcctgcacacgcccatgtacttcttcctagggaacctctccttcctggacatctgcttcactacctcctcagtcccactggtcctggacagctttttgactccccaggaaaccatctccttctcagcctgtgctgtgcagatggcactctcctttgccatggcaggaacagagtgcttgctcctgagcatgatggcatttgatcgctatgtggccatctgcaacccccttaggtactccgtgatcatgagcaaggctgcctacatgcccatggctgccagctcctgggctattggtggtgctgcttccgtggtacacacatccttggcaattcagctgcccttctgtggagacaatgtcatcaaccacttcacctgtgagattctggctgttctaaagttggcctgtgctgacatttccatcaatgtgatcagcatggaggtgacgaatgtgatcttcctaggagtcccggttctgttcatctctttctcctatgtcttcatcatcaccaccatcctgaggatcccctcagctgaggggaggaaaaaggtcttctccacctgctctgcccacctcaccgtggtgatcgtcttctacgggaccttattcttcatgtatgggaagcctaagtctaaggactccatgggagcagacaaagaggatctttcagacaaactcatcccccttttctatggggtggtgaccccgatgctcaaccccatcatctatagcctgaggaacaaggatgtgaaggctgctgtgaggagactgctgagaccaaaaggcttcactcagtgatggtggaagggtcctctgtgattgtcacccacatggaagtaaggaatcaca

SEQ ID NO: 414 - protein, 319 aa, Homo sapiens; identical to SEQ ID NO: 412

SEQ ID NO: 415 - DNA, 1028 bp, Homo sapiens
  CDS (18)..(974)
tgcagaggggatatcacatggaaaaagccaatgagacctcccctgtgatggggttcgttctcctggggctctctgcccacccagagctggaaaagacattcttcgtgctcatcctgctgatgtacctcgtgatcctgctgggcaatggggtcctcatcctggtgaccatccttgactcccgcctgcacacgcccatgtacttcttcctagggaacctctccttcctggacatctgcttcactacctcctcagtcccactggtcctggacagctttttgactccccaggaaaccatctccttctcagcctgtgctgtgcagatgacactctcctttgccatggcaggaacagagtgcttgctcctgagcatgatggcatttgatcgctatgtggccatctgcaacccccttaggtactccgtgatcatgagcaaggctgcctacatgcccatggctgccagctcctgggctattggtggtgctgcttccgtggtacacacatccttggcaattcagctgcccttctgtggagacaatgtcatcaaccacttcacctgtgagattctggctgttctaaagttggcctgtgctgacatttccatcaatgtgatcagcatggaggtgacgaatgtgatcttcctaggagtcccggttctgttcatctctttctcctatgtcttcatcatcaccaccatcctgaggatcccctcagctgaggggaggaaaaaggtcttctccacctgctctgcccacctcaccgtggtgatcgtcttctacgggaccttattcttcatgtatgggaagcctaagtctaaggactccatgggagcagacaaagaggatctttcagacaaactcatcccccttttctatggggtggtgaccccgatgctcaaccccatcatctatagcctgaggaacaaggatgtgaaggctgctgtgaggagactgctgagaccaaaaggcttcactcagtgatggtggaagggtcctctgtgattgtcacccacatggaagtaaggaatcaca

SEQ ID NO: 416 - protein, 319 aa, Homo sapiens
MEKANETSPVMGFVLLGLSAHPELEKTFFVLILLMYLVILLGNGVLILVTILDSRLHTPMYFFLGNLSFLDICFTTSSVPLVLDSFLTPQETISFSACAVQMTLSFAMAGTECLLLSMMAFDRYVAICNPLRYSVIMSKAAYMPMAASSWAIGGAASVVHTSLAIQLPFCGDNVINHFTCEILAVLKLACADISINVISMEVTNVIFLGVPVLFISFSYVFIITTILRIPSAEGRKKVFSTCSAHLTVVIVFYGTLFFMYGKPKSKDSMGADKEDLSDKLIPLFYGVVTPMLNPIIYSLRNKDVKAAVRRLLRPKGFTQ

SEQ ID NO: 417 - DNA, 1028 bp, Homo sapiens
  CDS (18)..(974)
tgcagaggggatatcacatggaaaaagccaatgagacctcccctgtgatggggttcgttctcctggggctctctgcccacccagagctggaaaagacattcttcgtgctcatcctgctgatgtacctcgtgatcctgctgggcaatggggtcctcatcctggtgaccatccttgactcccgcctgcacacgcccatgtacttcttcctagggaacctctccttcctggacatctgcttcactacctcctcagtcccactggtcctggacagctttttgactccccaggaaaccatctccttctcagcctgtgctgtgcagatggcactctcctttgccatggcaggaacagagtgcttgctcctgagcatgatggcatttgatcgctatgtggccatctgcaacccccttaggtactccgtgatcatgggcaaggctgcctacatgcccatggctgccagctcctgggctattggtggtgctgcttccgtggtacacacatccttggcaattcagctgcccttctgtggagacaatgtcatcaaccacttcacctgtgagattctggctgttctaaagttggcctgtgctgacatttccatcaatgtgatcagcatggaggtgacgaatgtgatcttcctaggagtcccggttctgttcatctctttctcctatgtcttcatcatcaccaccatcctgaggatcccctcagctgaggggaggaaaaaggtcttctccacctgctctgcccacctcaccgtggtgatcgtcttctacgggaccttattcttcatgtatgggaagcctaagtctaaggactccatgggagcagacaaagaggatctttcagacaaactcatcccccttttctatggggtggtgaccccgatgctcaaccccatcatctatagcctgaggaacaaggatgtgaaggctgctgtgaggagactgctgagaccaaaaggcttcactcagtgatggtggaagggtcctctgtgattgtcacccacatggaagtaaggaatcaca

SEQ ID NO: 418 - protein, 319 aa, Homo sapiens
MEKANETSPVMGFVLLGLSAHPELEKTFFVLILLMYLVILLGNGVLILVTILDSRLHTPMYFFLGNLSFLDICFTTSSVPLVLDSFLTPQETISFSACAVQMALSFAMAGTECLLLSMMAFDRYVAICNPLRYSVIMGKAAYMPMAASSWAIGGAASVVHTSLAIQLPFCGDNVINHFTCEILAVLKLACADISINVISMEVTNVIFLGVPVLFISFSYVFIITTILRIPSAEGRKKVFSTCSAHLTVVIVFYGTLFFMYGKPKSKDSMGADKEDLSDKLIPLFYGVVTPMLNPIIYSLRNKDVKAAVRRLLRPKGFTQ

SEQ ID NO: 419 - DNA, 1028 bp, Homo sapiens
  CDS (18)..(974)
tgcagaggggatatcacatggaaaaagccaatgagacctcccctgtgatggggttcgttctcctggggctctctgcccacccagagctggaaaagacattcttcgtgctcatcctgctgatgtacctcgtgatcctgctgggcaatggggtcctcatcctggtgaccatccttgactcccgcctgcacacgcccatgtacttcttcctagggaacctctccttcctggacatctgcttcactacctcctcagtcccactggtcctggacagctttttgactccccaggaaaccatctccttctcagcctgtgctgtgcagatggcactctcctttgccatggcaggaacagagtgcttgctcctgagcatgatggcatttgatcgctatgtggccatctgcaacccccttaggtactccgtgatcatgagcaaggctgcctacgtgcccatggctgccagctcctgggctattggtggtgctgcttccgtggtacacacatccttggcaattcagctgcccttctgtggagacaatgtcatcaaccacttcacctgtgagattctggctgttctaaagttggcctgtgctgacatttccatcaatgtgatcagcatggaggtgacgaatgtgatcttcctaggagtcccggttctgttcatctctttctcctatgtcttcatcatcaccaccatcctgaggatcccctcagctgaggggaggaaaaaggtcttctccacctgctctgcccacctcaccgtggtgatcgtcttctacgggaccttattcttcatgtatgggaagcctaagtctaaggactccatgggagcagacaaagaggatctttcagacaaactcatcccccttttctatggggtggtgaccccgatgctcaaccccatcatctatagcctgaggaacaaggatgtgaaggctgctgtgaggagactgctgagaccaaaaggcttcactcagtgatggtggaagggtcctctgtgattgtcacccacatggaagtaaggaatcaca

SEQ ID NO: 420 - protein, 319 aa, Homo sapiens
MEKANETSPVMGFVLLGLSAHPELEKTFFVLILLMYLVILLGNGVLILVTILDSRLHTPMYFFLGNLSFLDICFTTSSVPLVLDSFLTPQETISFSACAVQMALSFAMAGTECLLLSMMAFDRYVAICNPLRYSVIMSKAAYVPMAASSWAIGGAASVVHTSLAIQLPFCGDNVINHFTCEILAVLKLACADISINVISMEVTNVIFLGVPVLFISFSYVFIITTILRIPSAEGRKKVFSTCSAHLTVVIVFYGTLFFMYGKPKSKDSMGADKEDLSDKLIPLFYGVVTPMLNPIIYSLRNKDVKAAVRRLLRPKGFTQ

SEQ ID NO: 421 - DNA, 1028 bp, Homo sapiens
  CDS (18)..(974)
tgcagaggggatatcacatggaaaaagccaatgagacctcccctgtgatggggttcgttctcctggggctctctgcccacccagagctggaaaagacattcttcgtgctcatcctgctgatgtacctcgtgatcctgctgggcaatggggtcctcatcctggtgaccatccttgactcccgcctgcacacgcccatgtacttcttcctagggaacctctccttcctggacatctgcttcactacctcctcagtcccactggtcctggacagctttttgactccccaggaaaccatctccttctcagcctgtgctgtgcagatggcactctcctttgccatggcaggaacagagtgcttgctcctgagcatgatggcatttgatcgctatgtggccatctgcaacccccttaggtactccgtgatcatgagcaaggctgcctacatgcccatggctgccagctcctgggctattggtggtgctgcttccgtggtacacacatccttggcaattcagctgcccttctgtggagacaatgtcatcaaccacttcacctgtgagattctggctgttctaaagttggcctgtgctgacatttccatcaatgtgatcagcatggaggtgacgaatgtgatcttcctaggagtcccggttctgttcatctctttctcctatgtcttcatcatcaccaccatcctgaggatcccctcagctgagggaaggaaaaaggtcttctccacctgctctgcccacctcaccgtggtgatcgtcttctacgggaccttattcttcatgtatgggaagcctaagtctaaggactccatgggagcagacaaagaggatctttcagacaaactcatcccccttttctatggggtggtgaccccgatgctcaaccccatcatctatagcctgaggaacaaggatgtgaaggctgctgtgaggagactgctgagaccaaaaggcttcactcagtgatggtggaagggtcctctgtgattgtcacccacatggaagtaaggaatcaca

SEQ ID NO: 422 - protein, 319 aa, Homo sapiens [sequence omitted]

SEQ ID NO: 423 - DNA, 1028 bp, Homo sapiens
  CDS (18)..(974)
tgcagaggggatatcacatggaaaaagccaatgagacctcccctgtgatggggttcgttctcctggggctctctgcccacccagagctggaaaagacattcttcgtgctcatcctgctgatgtacctcgtgatcctgctgggcaatggggtcctcatcctggtgaccatccttgactcccgcctgcacacgcccatgtacttcttcctagggaacctctccttcctggacatctgcttcactacctcctcagtcccactggtcctggacagctttttgactccccaggaaaccatctccttctcagcctgtgctgtgcagatggcactctcctttgccatggcaggaacagagtgcttgctcctgagcatgatggcatttgatcgctatgtggccatctgcaacccccttaggtactccgtgatcatgagcaaggctgcctacatgcccatggctgccagctcctgggctattggtggtgctgcttccgtggtacacacatccttggcaattcagctgcccttctgtggagacaatgtcatcaaccacttcacctgtgagattctggctgttctaaagttggcctgtgctgacatttccatcaatgtgatcagcatggaggtgacgaatgtgatcttcctaggagtcccggttctgttcatctctttctcctatgtcttcatcatcaccaccatcctgaggatcccctcagctgaggggaggaaaaaggtcttctccacctgctctgcccacctcactgtggtgatcgtcttctacgggaccttattcttcatgtatgggaagcctaagtctaaggactccatgggagcagacaaagaggatctttcagacaaactcatcccccttttctatggggtggtgaccccgatgctcaaccccatcatctatagcctgaggaacaaggatgtgaaggctgctgtgaggagactgctgagaccaaaaggcttcactcagtgatggtggaagggtcctctgtgattgtcacccacatggaagtaaggaatcaca

SEQ ID NO: 424 - protein, 319 aa, Homo sapiens [sequence omitted]

SEQ ID NO: 425 - DNA, 953 bp, Homo sapiens
  CDS (11)..(946)
actctgcagcatggagccgctcaacagaacagaggtgtccgagttctttctgaaaggattttctggctacccagccctggagcatctgctcttccctctgtgctcagccatgtacctggtgaccctcctggggaacacagccatcatggcggtgagcgtgctagatatccacctgcacacgcctgtgtacttcttcctgggcaacctctctaccctggacatctgctacacgcccacctttgtgcctctgatgctggtccacctcctgtcatcccggaagaccatctcctttgctgtctgtgccatccagatgtgtctgagcctgtccacgggctccacggagtgcctgctactggccatcacggcctatgaccgctacctggccatctgccagccactcaggtaccgcgtgctcatgagccaccggctctgcgtgctgctgatgggagctgcctgggtcctctgcctcctcaagtcggtgactgagatggtcatctccatgaggctgcccttctgtggccaccacgtggtcagtcacttcacctgcaagatcctggcagtgctgaagctggcatgcggcaacacgtcggtcagcgaagacttcctgctggcgggctccatcctgctgctgcctgtacccctggcattcatctgcctgtcctacttgctcatcctggccaccatcctgagggtgccctcggccgccaggtgctgcaaagccttctccacctgcttggcacacctggctgtagtgctgcttttctacggcaccatcatcttcatgtacttgaagcccaagagtaaggaagcccacatctctgatgaggtcttcacagtcctctatgccatggtcacgaccatgctgaaccccaccatctacagcctgaggaacaaggaggtgaaggaggccgccaggaaggtgtggggcaggagtcgggcctccaggtgaggga

SEQ ID NO: 426 - protein, 312 aa, Homo sapiens [sequence omitted]

SEQ ID NO: 427 - DNA, 1050 bp, Homo sapiens
  CDS (59)..(994)
ccctgtaccctctctccttccatcccagctgtggaccatctcttcagaactctgcagcatggagccgctcaacagaacagaggtgtccgagttctttctgaaaggattttctggctacccagccctggagcatctgctcttccctctgtgctcagccatgtacctggtgaccctcctggggaacacagccatcatggcggtgagcgtgctagatatccacctgcacacgcccgtgtacttcttcctgggcaacctctctaccctggacatctgctacacgcccacctttgtgcctctgatgctggtccacctcctgtcatcccggaagaccatctcctttgctgtctgtgccatccagatgtgtctgagcctgtccacgggctccacggagtgcctgctactggccatcacggcctatgaccgctacctggccatctgccagccactcaggtaccacgtgctcatgagccaccggctctgcgtgctgctgatgggagctgcctgggtcctctgcctcctcaagtcggtgactgagatggtcatctccatgaggctgcccttctgtggccaccacgtggtcagtcacttcacctgcaagatcctggcagtgctgaagctggcatgcggcaacacgtcggtcagcgaagacttcctgctggcgggctccatcctgctgctgcctgtacccctggcattcatctgcctgtcctacttgctcatcctggccaccatcctgagggtgccctcggccgccaggtgctgcaaagccttctccacctgcttggcacacctggctgtagtgctgcttttctacggcaccatcatcttcatgtacttgaagcccaagagtaaggaagcccacatctctgatgaggtcttcacagtcctctatgccatggtcacgaccatgctgaaccccaccatctacagcctgaggaacaaggaggtgaaggaggccgccaggaaggtgtggggcaggagtcgggcctccaggtgagggagggcggggctctgtacagacgcaggtctcaggttagtagctgaggccat

SEQ ID NO: 428 - protein, 312 aa, Homo sapiens
MEPLNRTEVSEFFLKGFSGYPALEHLLFPLCSAMYLVTLLGNTAIMAVSVLDIHLHTPVYFFLGNLSTLDICYTPTFVPLMLVHLLSSRKTISFAVCAIQMCLSLSTGSTECLLLAITAYDRYLAICQPLRYHVLMSHRLCVLLMGAAWVLCLLKSVTEMVISMRLPFCGHHVVSHFTCKILAVLKLACGNTSVSEDFLLAGSILLLPVPLAFICLSYLLILATILRVPSAARCCKAFSTCLAHLAVVLLFYGTIIFMYLKPKSKEAHISDEVFTVLYAMVTTMLNPTIYSLRNKEVKEAARKVWGRSRASR

SEQ ID NO: 429 - DNA, 917 bp, Homo sapiens
  CDS (3)..(860)
tgctcttccctctgtgctcagccatgtacctggtgaccctcctggggaacacagccatcatggcggtgagcgtgctagatatccacctgcacacgcccgtgtacttcttcctgggcaacctctctaccctggacatctgctacacgcccacctttgtgcctctgatgctggtccacctcctgtcatcccggaagaccatctcctttgctgtctgtgccatccagatgtgtctgagcctgtccacgggctccacggagtgcctgctactggccatcacggcctatgaccgctacctggccatctgccagccactcaggtaccacgtgctcatgagccaccggctctgcgtgctgctgatgggagctgcctgggtcctctgcctcctcaagtcggtgactgagatggtcatctccatgaggctgcccttctgtggccaccacgtggtcagtcacttcacctgcaagatcctggcagtgctgaagctggcatgcggcaacacgtcggtcagcgaagacttcctgctggcgggctccatcctgctgctgcctgtacccctggcattcatctgcctgtcctacttgctcatcctggccaccatcctgagggtgccctcggccgccaggtgctgcaaagccttctccacctgcttggcacacctggctgtagtgctgcttttctacggcaccatcatcttcatgtacttgaagcccaagagtaaggaagcccacatctctgatgaggtcttcacagtcctctatgccatggtcacgaccatgctgaaccccaccatctacagcctgaggaacaaggaggtgaaggaggccgccaggaaggtgtggggcaggagtcgggcctccaggtgagggagggcggggctctgtacagacgcaggtctcaggttagtagctgaggccatc

SEQ ID NO: 430 - protein, 286 aa, Homo sapiens
LFPLCSAMYLVTLLGNTAIMAVSVLDIHLHTPVYFFLGNLSTLDICYTPTFVPLMLVHLLSSRKTISFAVCAIQMCLSLSTGSTECLLLAITAYDRYLAICQPLRYHVLMSHRLCVLLMGAAWVLCLLKSVTEMVISMRLPFCGHHVVSHFTCKILAVLKLACGNTSVSEDFLLAGSILLLPVPLAFICLSYLLILATILRVPSAARCCKAFSTCLAHLAVVLLFYGTIIFMYLKPKSKEAHISDEVFTVLYAMVTTMLNPTIYSLRNKEVKEAARKVWGRSRASR

SEQ ID NO: 431 - DNA, 1025 bp, Homo sapiens
  CDS (33)..(968)
agctgtggaccatctcttcagaactctgcagcatggagccgctcaacagaacagaggtgtccgagttctttctgaaaggattttctggctacccagccctggagcatctgctcttccctctgtgctcagccatgtacctggtgaccctcctggggaacacagccatcatggcggtgagcgtgctagatatccacctgcacacgcccgtgtacttcttcctgggcaacctctctaccctggacatctgctacacgcccacctttgtgcctctgatgctggtccacctcctgtcatcccggaagaccatctcctttgctgtctgtgccatccagatgtgtctgagcctgtccacgggctccacggagtgcctgctactggccatcacggcctatgaccgctacctggccatctgccagccactcaggtaccacgtgctcatgagccaccggctctgcgtgctgctgatgggagctgcctgggtcctctgcctcctcaagtcggtgactgagatggtcatctccatgaggctgcccttctgtggccaccacgtggtcagtcacttcacctgcaagatcctggcagtgctgaagctggcatgcggcaacacgtcggtcagcgaagacttcctgctggcgggctccatcctgctgctgcctgtacccctggcattcatctgcctgtcctacttgctcatcctggccaccatcctgagggtgccctcggccgccaggtgctgcaaagccttctccacctgcttggcacacctggctgtagtgctgcttttctacggcaccatcatcttcatgtacttgaagcccaagagtaaggaagcccacatctctgatgaggtcttcacagtcctctatgccatggtcacgaccatgctgaaccccaccatctacagcctgaggaacaaggaggtgaaggaggccgccaggaaggtgtggggcaggagtcgggcctccaggtgagggagggcggggctctgtacagacgcaggtctcaggttagtagctgaggccatc

SEQ ID NO: 432 - protein, 312 aa, Homo sapiens; identical to SEQ ID NO: 428

SEQ ID NO: 433 - DNA, 953 bp, Homo sapiens
  CDS (11)..(946)
actctgcagcatggagccgctcaacagaacagaggtgtccgagttctttctgaaaggattttctggctacccagccctggagcatctgctcttccctctgtgctcagccatgtacctggtgaccctcctggggaacacagccatcatggcggtgagcgtgctagatatccacctgcacacgcccgtgtacttcttcctgggcaacctctctaccctggacatctgctacacgcccacctttgtgcctctgatgctggtccacctcctgtcatcccggaagaccatctcctttgctgtctgtgccatccagatgtgtctgagcctgtccacgggctccacggagtgcctgctactggccatcacggcctatgaccgctacctggccatctgccagccactcaggtaccgcgtgctcatgagccaccggctctgcgtgctgctgatgggagctgcctgggtcctctgcctcctcaagtcggtgactgagatggtcatctccatgaggctgcccttctgtggccaccacgtggtcagtcacttcacctgcaagatcctggcagtgctgaagctggcatgcggcaacacgtcggtcagcgaagacttcctgctggcgggctccatcctgctgctgcctgtacccctggcattcatctgcctgtcctacttgctcatcctggccaccatcctgagggtgccctcggccgccaggtgctgcaaagccttctccacctgcttggcacacctggctgtagtgctgcttttctacggcaccatcatcttcatgtacttgaagcccaagagtaaggaagcccacatctctgatgaggtcttcacagtcctctatgccatggtcacgaccatgctgaaccccaccatctacagcctgaggaacaaggaggtgaaggaggccgccaggaaggtgtggggcaggagtcgggcctccaggtgaggga

SEQ ID NO: 434 - protein, 312 aa, Homo sapiens [sequence omitted]

SEQ ID NO: 435 - DNA, 953 bp, Homo sapiens
  CDS (11)..(946)
actctgcagcatggagccgctcaacagaacagaggtgtccgagttctttctgaaaggattttctggctacccagccctggagcatctgctcttccctctgtgctcagccatgtacctggtgaccctcctggggaacacagccatcatggcggtgagcgtgctagatatccacctgcacacgcctgtgcacttcttcctgggcaacctctctaccctggacatctgctacacgcccacctttgtgcctctgatgctggtccacctcctgtcatcccggaagaccatctcctttgctgtctgtgccatccagatgtgtctgagcctgtccacgggctccacggagtgcctgctactggccatcacggcctatgaccgctacctggccatctgccagccactcaggtaccgcgtgctcatgagccaccggctctgcgtgctgctgatgggagctgcctgggtcctctgcctcctcaagtcggtgactgagatggtcatctccatgaggctgcccttctgtggccaccacgtggtcagtcacttcacctgcaagatcctggcagtgctgaagctggcatgcggcaacacgtcggtcagcgaagacttcctgctggcgggctccatcctgctgctgcctgtacccctggcattcatctgcctgtcctacttgctcatcctggccaccatcctgagggtgccctcggccgccaggtgctgcaaagccttctccacctgcttggcacacctggctgtagtgctgcttttctacggcaccatcatcttcatgtacttgaagcccaagagtaaggaagcccacatctctgatgaggtcttcacagtcctctatgccatggtcacgaccatgctgaaccccaccatctacagcctgaggaacaaggaggtgaaggaggccgccaggaaggtgtggggcaggagtcgggcctccaggtgaggga

SEQ ID NO: 436 - protein, 312 aa, Homo sapiens
MEPLNRTEVSEFFLKGFSGYPALEHLLFPLCSAMYLVTLLGNTAIMAVSVLDIHLHTPVHFFLGNLSTLDICYTPTFVPLMLVHLLSSRKTISFAVCAIQMCLSLSTGSTECLLLAITAYDRYLAICQPLRYRVLMSHRLCVLLMGAAWVLCLLKSVTEMVISMRLPFCGHHVVSHFTCKILAVLKLACGNTSVSEDFLLAGSILLLPVPLAFICLSYLLILATILRVPSAARCCKAFSTCLAHLAVVLLFYGTIIFMYLKPKSKEAHISDEVFTVLYAMVTTMLNPTIYSLRNKEVKEAARKVWGRSRASR

SEQ ID NO: 437 - DNA, 953 bp, Homo sapiens
  CDS (11)..(946)
actctgcagcatggagccgctcaacagaacagaggtgtccgagttctttctgaaaggattttctggctacccagccctggagcatctgctcttccctctgtgctcagccatgtacctggtgaccctcctggggaacacagccatcatggcggtgagcgtgctagatatccacctgcacacgcctgtgtacttcttcctgggcaacctctctaccctggacatctgctacacgcccacctttgtgcctctgatgctggtccacctcctgtcatcccggaagaccatctcctttgctgtctgtgccatccagatgtgtctgagcctgtccacgggctccacggagtgcctgctactggccatcacggcctatgaccgctacctggccatctgccagccactcaggtaccacgtgctcatgagccaccggctctgcgtgctgctgatgggagctgcctgggtcctctgcctcctcaagtcggtgactgagatggtcatctccatgaggctgcccttctgtggccaccacgtggtcagtcacttcacctgcaagatcctggcagtgctgaagctggcatgcggcaacacgtcggtcagcgaagacttcctgctggcgggctccatcctgctgctgcctgtacccctggcattcatctgcctgtcctacttgctcatcctggccaccatcctgagggtgccctcggccgccaggtgctgcaaagccttctccacctgcttggcacacctggctgtagtgctgcttttctacggcaccatcatcttcatgtacttgaagcccaagagtaaggaagcccacatctctgatgaggtcttcacagtcctctatgccatggtcacgaccatgctgaaccccaccatctacagcctgaggaacaaggaggtgaaggaggccgccaggaaggtgtggggcaggagtcgggcctccaggtgaggga

SEQ ID NO: 438 - protein, 312 aa, Homo sapiens; identical to SEQ ID NO: 428

SEQ ID NO: 439 - DNA, 953 bp, Homo sapiens
  CDS (11)..(946)
actctgcagcatggagccgctcaacagaacagaggtgtccgagttctttctgaaaggattttctggctacccagccctggagcatctgctcttccctctgtgctcagccatgtacctggtgaccctcctggggaacacagccatcatggcggtgagcgtgctagatatccacctgcacacgcctgtgtacttcttcctgggcaacctctctaccctggacatctgctacacgcccacctttgtgcctctgatgctggtccacctcctgtcatcccggaagaccatctcctttgctgtctgtgccatccagatgtgtctgagcctgtccacgggctccacggagtgcctgctactggccatcacggcctatgaccgctacctggccatctgccagccactcaggtaccgcgtgctcatgagccaccggctctgcgtgctgctgatgggagctgcctgggtcctctgcctcctcaagtcggtgactgagatggtcatctccacgaggctgcccttctgtggccaccacgtggtcagtcacttcacctgcaagatcctggcagtgctgaagctggcatgcggcaacacgtcggtcagcgaagacttcctgctggcgggctccatcctgctgctgcctgtacccctggcattcatctgcctgtcctacttgctcatcctggccaccatcctgagggtgccctcggccgccaggtgctgcaaagccttctccacctgcttggcacacctggctgtagtgctgcttttctacggcaccatcatcttcatgtacttgaagcccaagagtaaggaagcccacatctctgatgaggtcttcacagtcctctatgccatggtcacgaccatgctgaaccccaccatctacagcctgaggaacaaggaggtgaaggaggccgccaggaaggtgtggggcaggagtcgggcctccaggtgaggga

SEQ ID NO: 440 - protein, 312 aa, Homo sapiens
MEPLNRTEVSEFFLKGFSGYPALEHLLFPLCSAMYLVTLLGNTAIMAVSVLDIHLHTPVYFFLGNLSTLDICYTPTFVPLMLVHLLSSRKTISFAVCAIQMCLSLSTGSTECLLLAITAYDRYLAICQPLRYRVLMSHRLCVLLMGAAWVLCLLKSVTEMVISTRLPFCGHHVVSHFTCKILAVLKLACGNTSVSEDFLLAGSILLLPVPLAFICLSYLLILATILRVPSAARCCKAFSTCLAHLAVVLLFYGTIIFMYLKPKSKEAHISDEVFTVLYAMVTTMLNPTIYSLRNKEVKEAARKVWGRSRASR

SEQ ID NO: 441 - DNA, 1260 bp, Homo sapiens
  CDS (105)..(1142)
tgctccctgtttcattaaaacctagagagatgtaatcagtaagcaagaaggaaaaagggaaattcacaaagtaactttttgtgtctgtttctttttaacccagcatggagagaaaatttatgtccttgcaaccatccatctccgtatcagaaatggaaccaaatggcaccttcagcaataacaacagcaggaactgcacaattgaaaacttcaagagagaatttttcccaattgtatatctgataatatttttctggggagtcttgggaaatgggttgtccatatatgttttcctgcagccttataagaagtccacatctgtgaacgttttcatgctaaatctggccatttcagatctcctgttcataagcacgcttcccttcagggctgactattatcttagaggctccaattggatatttggagacctggcctgcaggattatgtcttattccttgtatgtcaacatgtacagcagtatttatttcctgaccgtgctgagtgttgtgcgtttcctggcaatggttcacccctttcggcttctgcatgtcaccagcatcaggagtgcctggatcctctgtgggatcatatggatccttatcatggcttcctcaataatgctcctggacagtggctctgagcagaacggcagtgtcacatcatgcttagagctgaatctctataaaattgctaagctgcagaccatgaactatattgccttggtggtgggctgcctgctgccatttttcacactcagcatctgttatctgctgatcattcgggttctgttaaaagtggaggtcccagaatcggggctgcgggtttctcacaggaaggcactgaccaccatcatcatcaccttgatcatcttcttcttgtgtttcctgccctatcacacactgaggaccgtccacttgacgacatggaaagtgggtttatgcaaagacagactgcataaagctttggttatcacactggccttggcagcagccaatgcctgcttcaatcctctgctctattactttgctggggagaattttaaggacagactaaagtctgcactcagaaaaggccatccacagaaggcaaagacaaagtgtgttttccctgttagtgtgtggttgagaaaggaaacaagagtataaggagctcttagatgagacctgttcttgtatccttgtgtccatcttcattcactcatagtctccaaatgactttgtatttacatcactcccaacaaatgttgattcttaatattta

SEQ ID NO: 442 - protein, 346 aa, Homo sapiens
MERKFMSLQPSISVSEMEPNGTFSNNNSRNCTIENFKREFFPIVYLIIFFWGVLGNGLSIYVFLQPYKKSTSVNVFMLNLAISDLLFISTLPFRADYYLRGSNWIFGDLACRIMSYSLYVNMYSSIYFLTVLSVVRFLAMVHPFRLLHVTSIRSAWILCGIIWILIMASSIMLLDSGSEQNGSVTSCLELNLYKIAKLQTMNYIALVVGCLLPFFTLSICYLLIIRVLLKVEVPESGLRVSHRKALTTIIITLIIFFLCFLPYHTLRTVHLTTWKVGLCKDRLHKALVITLALAAANACFNPLLYYFAGENFKDRLKSALRKGHPQKAKTKCVFPVSVWLRKETRV

SEQ ID NO: 443 - DNA, 1193 bp, Homo sapiens
  CDS (105)..(1142)
tgctccctgtttcattaaaacctagagagatgtaatcagtaagcaagaaggaaaaagggaaattcacaaagtaactttttgtgtctgtttctttttaacccagcatggagagaaaatttatgtccttgcaaccatccatctccgtatcagaaatggaaccaaatggcaccttcagcaataacaacagcaggaactgcacaattgaaaacttcaagagagaatttttcccaattgtatatctgataatatttttctggggagtcttgggaaatgggttgtccatatatgttttcctgcagccttataagaagtccacatctgtgaacgttttcatgctaaatctggccatttcagatctcctgttcataagcacgcttcccttcagggctgactattatcttagaggctccaattggatatttggagacctggcctgcaggattatgtcttattccttgtatgtcaacatgtacagcagtatttatttcctgaccgtgctgagtgttgtgcgtttcctggcaatggttcacccctttcggcttctgcatgtcaccagcatcaggagtgcctggatcctctgtgggatcatatggatccttatcatggcttcctcaataatgctcctggacagtggctctgagcagaacggcagtgtcacatcatgcttagagctgaatctctataaaattgctaagctgcagaccatgaactatattgccttggtggtgggctgcctgctgccatttttcacactcagcatctgttatctgctgatcattcgggttctgttaaaagtggaggtcccagaatcggggctgcgggtttctcacaggaaggcactgaccaccatcatcatcaccttgatcatcttcttcttgtgtttcctgccctatcacacactgaggaccgtccacttgacgacatggaaagtgggtttatgcaaagacagactgcataaagctttggttatcacactggccttggcagcagccaatgcctgcttcaatcctctgctctattactttgctggggagaattttaaggacagactaaagtctgcactcagaaaaggccatccacagaaggcaaagacaaagtgtgttttccctgttagtgtgtggttgagaaaggaaacaagagtataaggagctcttagatgagacctgttcttgtatccttgtgtccatcttcat

SEQ ID NO: 444 - protein, 346 aa, Homo sapiens; identical to SEQ ID NO: 442

SEQ ID NO: 445 - DNA, 2066 bp, Homo sapiens
  CDS (22)..(2031)
acaggtttcacaacttcccggatggggctgtggtgggtcacagtgcagcctccagccagaaggatggggtggctcccactcctgctgcttctgactcaatgcttaggggtccctgggcagcgctcgccattgaatgacttccaagtgctccggggcacagagctacagcacctgctacatgcggtggtgcccgggccttggcaggaggatgtggcagatgctgaagagtgtgctggtcgctgtgggcccttaatggactgccgggccttccactacaacgtgagcagccatggttgccaactgctgccatggactcaacactcgccccacacgaggctgcggcgttctgggcgctgtgacctcttccagaagaaagactacgtacggacctgcatcatgaacaatggggttgggtaccggggcaccatggccacgaccgtgggtggcctgccctgccaggcttggagccacaagttcccgaatgatcacaagtacacgcccactctccggaatggcctggaagagaacttctgccgtaaccctgatggcgaccccggaggtccttggtgctacacaacagaccctgctgtgcgcttccagagctgcggcatcaaatcctgccgggaggccgcgtgtgtctggtgcaatggcgaggaataccgcggcgcggtagaccgcacggagtcagggcgcgagtgccagcgctgggatcttcagcacccgcaccagcaccccttcgagccgggcaagttcctcgaccaaggtctggacgacaactattgccggaatcctgacggctccgagcggccatggtgctacactacggatccgcagatcgagcgagagttctgtgacctcccccgctgcgggtccgaggcacagccccgccaagaggccacaactgtcagctgcttccgcgggaagggtgagggctaccggggcacagccaataccaccactgcgggcgtaccttgccagcgttgggacgcgcaaatccctcatcagcaccgatttacgccagaaaaatacgcgtgcaaagaccttcgggagaacttctgccggaaccccgacggctcagaggcgccctggtgcttcacactgcggcccggcatgcgcgcggccttttgctaccagatccggcgttgtacagacgacgtgcggccccaggactgctaccacggcgcaggggagcagtaccgcggcacggtcagcaagacccgcaagggtgtccagtgccagcgctggtccgctgagacgccgcacaagccgcagttcacgtttacctccgaaccgcatgcacaactggaggagaacttctgccggaacccagatggggatagccatgggccctggtgctacacgatggacccaaggaccccattcgactactgtgccctgcgacgctgcgctgatgaccagccgccatcaatcctggaccccccagaccaggtgcagtttgagaagtgtggcaagagggtggatcggctggatcagcggcgttccaagctgcgcgtggttgggggccatccgggcaactcaccctggacagtcagcttgcggaatcggcagggccagcatttctgcggggggtctctagtgaaggagcagtggatactgactgcccggcagtgcttctcctcctgccatatgcctctcacgggctatgaggtatggttgggcaccctgttccagaacccacagcatggagagccaagcctacagcgggtcccagtagccaagatggtgtgtgggccctcaggctcccagcttgtcctgctcaagctggagagatctgtgaccctgaaccagcgtgtggccctgatctgcctgccccctgaatggtatgtggtgcctccagggaccaagtgtgagggtgactacgggggcccacttgcctgctttacccacaactgctgggtcctggaaggaattataatccccaaccgagtatgcgcaaggtcccgctggccagctgtcttcacgcgtgtctctgtgtttgtggactggattcacaaggtcatgagactgggttaggcccagccttgatgccatatgccttggggagg

SEQ ID NO: 446 - protein, 670 aa, Homo sapiens
MGLWWVTVQPPARRMGWLPLLLLLTQCLGVPGQRSPLNDFQVLRGTELQHLLHAVVPGPWQEDVADAEECAGRCGPLMDCRAFHYNVSSHGCQLLPWTQHSPHTRLRRSGRCDLFQKKDYVRTCIMNNGVGYRGTMATTVGGLPCQAWSHKFPNDHKYTPTLRNGLEENFCRNPDGDPGGPWCYTTDPAVRFQSCGIKSCREAACVWCNGEEYRGAVDRTESGRECQRWDLQHPHQHPFEPGKFLDQGLDDNYCRNPDGSERPWCYTTDPQIEREFCDLPRCGSEAQPRQEATTVSCFRGKGEGYRGTANTTTAGVPCQRWDAQIPHQHRFTPEKYACKDLRENFCRNPDGSEAPWCFTLRPGMRAAFCYQIRRCTDDVRPQDCYHGAGEQYRGTVSKTRKGVQCQRWSAETPHKPQFTFTSEPHAQLEENFCRNPDGDSHGPWCYTMDPRTPFDYCALRRCADDQPPSILDPPDQVQFEKCGKRVDRLDQRRSKLRVVGGHPGNSPWTVSLRNRQGQHFCGGSLVKEQWILTARQCFSSCHMPLTGYEVWLGTLFQNPQHGEPSLQRVPVAKMVCGPSGSQLVLLKLERSVTLNQRVALICLPPEWYVVPPGTKCEGDYGGPLACFTHNCWVLEGIIIPNRVCARSRWPAVFTRVSVFVDWIHKVMRLG

SEQ ID NO: 447 - DNA, 1698 bp, Homo sapiens
  CDS (1)..(1695)
atgacttctaggtgctccggggcacagagctacctacaagcggtggtgcccgggccttggcaggaggatgtggcagatgctgaagagtgtgctggtcgctgtgggcccttaatggactgcgcgttccactacaatgtgagcagccatggttgccaactgctgccatggactcaacactcaccccacacgaggctgcggcattctgggcgctgtgacctcttccaggagaaagactacatacggacctgcatcatgaacaatggggttgggtaccggggcaccatggccacgaccgtgggtggcctgtcctgccaggcttggagccacaagttcccgaacgatcaccagtacatgcccacgctccggaatggcctggaagagaacttctgccgtaaccctgatggcgaccccggaggtccttggtgccacacaacagaccctgccgtgcgcttccagagctgcggcatcaaatcctgccgggtggccgcgtgtgtctggtgcaatggcgaggaataccgcggcgcggtagaccgcaccgagtcagggcgcgagtgccagcgctgggatcttcagcacccgcaccagcaccccttcgagccgggcaagttcctcgaccaaggtctggacgacaactattgccggaatcctgacggctccgagcggccatggtgctacactacggatccgcagatcgagcgagaattctgtgacctcccccgctgcggttccgaggcacagccccgccaagaggccacaagtgtcagctgcttccgcgggaagggtgagggctaccggggcacagccaataccaccaccgcgggcgtaccttgccagcgttgggacgcgcaaatcccgcatcagcaccgatttacgccagaaaaatacgcgtgcaaggaccttcgggagaacttctgccggaaccccgacggctcagaggcgccctggtgcttcacactgcggcccggcatgcgcgtgggcttttgctaccagatccggcgttgtacagacgacgtgcggccccaggactgctaccacggcgcgggggagcagtaccgcggcacggtcagcaagacccgcaagggtgtccagtgccagcgcgggtccgctgagacgccgcacaagccgcagttcacgtttacctccgaaccgcatgcacaactggaggagaacttctgccaggacccagatggggatagccatgggccctggtgctacacgatggacccaaggaccccattcgactactgtgccctgcgacgctgcgctgatgaccagccgccatcaatcctggacccccccgaccaggtgcagtttgagaagtgtggcaagagggtggatcggctggatcagcgttgttccaagctgcgcgtggctgggggccatccgggcaactcaccctggacagtcagcttgcggaataggcagggccagcatttctgcggggggtctctagtgaaggagcagtggatactgactgcccggcagtgcttctcctccagccatatgcctctcacgggctatgaggtatggttgggcaccctgttccagaacccacaacatggagagccaggcctacagcgggtcccagtagccaagatgctgtgtgggccctcaggctctcagcttgtcctgctcaagctggagaggtctgtgaccctgaaccagcgtgtggccctgatctgcctgccgcctgaatga

SEQ ID NO: 448 - protein, 565 aa, Homo sapiens
MTSRCSGAQSYLQAVVPGPWQEDVADAEECAGRCGPLMDCAFHYNVSSHGCQLLPWTQHSPHTRLRHSGRCDLFQEKDYIRTCIMNNGVGYRGTMATTVGGLSCQAWSHKFPNDHQYMPTLRNGLEENFCRNPDGDPGGPWCHTTDPAVRFQSCGIKSCRVAACVWCNGEEYRGAVDRTESGRECQRWDLQHPHQHPFEPGKFLDQGLDDNYCRNPDGSERPWCYTTDPQIEREFCDLPRCGSEAQPRQEATSVSCFRGKGEGYRGTANTTTAGVPCQRWDAQIPHQHRFTPEKYACKDLRENFCRNPDGSEAPWCFTLRPGMRVGFCYQIRRCTDDVRPQDCYHGAGEQYRGTVSKTRKGVQCQRGSAETPHKPQFTFTSEPHAQLEENFCQDPDGDSHGPWCYTMDPRTPFDYCALRRCADDQPPSILDPPDQVQFEKCGKRVDRLDQRCSKLRVAGGHPGNSPWTVSLRNRQGQHFCGGSLVKEQWILTARQCFSSSHMPLTGYEVWLGTLFQNPQHGEPGLQRVPVAKMLCGPSGSQLVLLKLERSVTLNQRVALICLPPE

SEQ ID NO: 449 - DNA, 2200 bp, Homo sapiens
  CDS (21)..(2156)
tgcagcctccagccagaaggatggggtggctcccactcctgctgcttctgactcaatgcttaggggtccctgggcagcgctcgccattgaatgacttcgaggtgctccggggcacagagctacagcggctgctacaagcggtggtgcccgggccttggcaggaggatgtggcagatgctgaagagtgtgctggtcgctgtgggcccttaatggactgccgggcgttccactacaatgtgagcagccatggttgccaactgctgccatggactcaacactcaccccacacgaggctgcggcattctgggcgctgtgacctcttccaggagaaagactacatacggacctgcatcatgaacaatggggttgggtaccggggcaccatggccacgaccgtgggtggcctgtcctgccaggcttggagccacaagttcccgaacgatcacaggtacatgcccacgctccggaatggcctggaagagaacttctgccgtaaccctgatggcgaccccggaggtccttggtgccacacaacagaccctgccgtgcgcttccagagctgcggcatcaaatcctgccggtctgccgcgtgtgtctggtgcaatggcgaggaataccgcggcgcggtagaccgcaccgagtcagggcgcgagtgccagcgctgggatcttcagcacccgcaccagcaccccttcgagccgggcaagtaccccgaccaaggtctggacgacaactattgccggaatcctgacggctccgagcggccatggtgctacactacggatccgcagatcgagcgagaattctgtgacctcccccgctgcggttccgaggcacagccccgccaagaggccacaagtgtcagctgcttccgcgggaagggtgagggctaccggggcacagccaataccaccaccgcgggcgtaccttgccagcgttgggacgcgcaaatcccgcatcagcaccgatttacgccagaaaaatacgcgtgcaaggaccttcgggagaacttctgccggaaccccgacggctcagaggcgccctggtgcttcacactgcggcccggcatgcgcgtgggcttttgctaccagatccggcgttgtacagacgacgtgcggccccagggttgctaccacggcgcgggggagcagtaccgcggcacggtcagcaagacccgcaagggtgtccagtgccagcgcgcgtccgctgagacgccgcacaagccgcagtttacctttacctccgaaccgcatgcacaactggaggagaacttctgccgcgacccagatggggatagctatgggccctggtgctacacgatggacccaaggaccccattcgactactgtgccctgcgacgctgcgctgatgaccagccgccatcaatcctggacccccccgaccaggtgcagtttgagaagtgtggcaagagggtggatcggctggatcagcgttgttccaagctgcgcgtggctgggggccatccgggcaactcaccctggacagtcagcttgcggaataggcagggccagcatttctgcggggggtctctagtgaaggagcagtggatactgactgcccggcagtgcttctcctccagccatatgcctctcacgggctatgaggtatggttgggcaccctgttccagaacccacaacatggagagccaggcctacagcgggtcccagtagccaagatgctgtgtgggccctcaggctctcagcttgtcctgctcaagctggagagatctgtgaccctgaaccagcgtgtggccctgatctgcctgccgcctgaatggtatgtggtgcctccagggaccaagtgtgagattgcaggccggggtgagaccaaaggtacgggtaatgacacagtcctaaatgtggccttgctgaatgtcatctccaaccaggagtgtaacatcaagcaccgaggacatgtgcgggagagcgagatgtgcactgagggactgttggcccctgtgggggcctgtgaggggggtgactacgggggcccacttgcctgctttacccacaactgctgggtcctggaaggaattagaatccccaaccgagtatgcgcaaggtcgcgctggccagccgtcttcacacgtgtctctgtgtttgtggactggattcacaaggtcatgagactgggttaggcccagccttgacgccatatgctttggggaggacaaaactt

SEQ ID NO: 450 - protein, 712 aa, Homo sapiens
MGWLPLLLLLTQCLGVPGQRSPLNDFEVLRGTELQRLLQAVVPGPWQEDVADAEECAGRCGPLMDCRAFHYNVSSHGCQLLPWTQHSPHTRLRHSGRCDLFQEKDYIRTCIMNNGVGYRGTMATTVGGLSCQAWSHKFPNDHRYMPTLRNGLEENFCRNPDGDPGGPWCHTTDPAVRFQSCGIKSCRSAACVWCNGEEYRGAVDRTESGRECQRWDLQHPHQHPFEPGKYPDQGLDDNYCRNPDGSERPWCYTTDPQIEREFCDLPRCGSEAQPRQEATSVSCFRGKGEGYRGTANTTTAGVPCQRWDAQIPHQHRFTPEKYACKDLRENFCRNPDGSEAPWCFTLRPGMRVGFCYQIRRCTDDVRPQGCYHGAGEQYRGTVSKTRKGVQCQRASAETPHKPQFTFTSEPHAQLEENFCRDPDGDSYGPWCYTMDPRTPFDYCALRRCADDQPPSILDPPDQVQFEKCGKRVDRLDQRCSKLRVAGGHPGNSPWTVSLRNRQGQHFCGGSLVKEQWILTARQCFSSSHMPLTGYEVWLGTLFQNPQHGEPGLQRVPVAKMLCGPSGSQLVLLKLERSVTLNQRVALICLPPEWYVVPPGTKCEIAGRGETKGTGNDTVLNVALLNVISNQECNIKHRGHVRESEMCTEGLLAPVGACEGGDYGGPLACFTHNCWVLEGIRIPNRVCARSRWPAVFTRVSVFVDWIHKVMRLG

SEQ ID NO: 451 - DNA, 1710 bp, Homo sapiens
  CDS (1)..(1704)
atgacttccaggtgctccggggcacagagctacctgctacatgcggtggtgcctgggccttggcaggaggatgtggcagatgctgaagagtgtgctggtcgctgtgggcccttaacggactgctgggccttccactacaatgtgagcagccatggttgccaactgctgccatggactcaacactcgccccactcaaggctgtggcattctgggcgctgtgacctcttccagaagaaagactacatacggacctgcatcatgaacaatggggttgggtaccggggcaccatggccacgaccgtgggtggcctgtcctgccaggcttggagccacaagttcccgaatgatcacaagtacatgcccacgctccggaatggcctggaagagaacttctgccataaccctgatggcgaccccggaggtccttggtgccacacaacagaccctgccgtgcgcttccagagctgcggcatcaaatcctgccgggtggccgcgtgtgtctggtgcaatggcgaggaataccgcggcgcggtagaccgcaccgagtcagggcgcgagtgccagcgctgggatcttcagcacccgcaccagcaccccttcgagccgggcaagtacctcgaccaaggtctggacgacaactattgccggaatcctgacggctccgagcggccatggtgctacactacggatccgcagatcgagcgagaattctgtgacctcccccgctgcggttccgaggcacagccccgccaagaggccacaagtgtcagctgcttccgcgggaagggtgagggctaccggggcacagccaataccaccaccgcgggcgtaccttgccagcgttgggacgcgcaaatcccgcatcagcaccgatttacgccagaaaaatacgcgtgcaaggaccttcgggagaacttctgccggaaccccgacggctcagaggcgccctggtgcttcacactgcggcccggcatgcgcgtgggcttttgctaccagatccggcgttgtacagacgacgtgcggccccaggactgctaccacggcgcgggggagcagtaccgcggcacggtcagcaagacccgcaagggtgtccagtgccagcgcgcgtccgctgagacgccgcacaagccgcagttcacgtttacctccgaaccgcatgcacaactggaggagaacttctgccaggacccagatggggatagccatgggccctggtgctacacgatggacccaaggaccccattcgactactgtgccctgcgacgctgcgctgatgaccagccgccatcaatcctggacccccccacagaccaggtgcagtttgagaagtgtggcaagagggtggatcggctggatcagcgtcgttccaagctgcgcgtggctgggggccatccgggcaactcaccctggacagtcagcttggggaatcggaggcagggccagcatttctgcggggggtctctagtgaaggagcagtggatactgactgcccggcagtgcttctcctcccatatgcctctcacgggctatgaggtatggttgggcaccctgttccagaacccacaacatggagagccaggcctacagcgggtcccagtagccaagatgctgtgtgggccctcaggctcccagcttgtcctgctcaagctggagagatctgtgaccctgaaccagcgtgtggccctgatctgcctgccgcctgaatgatat

SEQ ID NO: 452 - protein, 568 aa, Homo sapiens
MTSRCSGAQSYLLHAVVPGPWQEDVADAEECAGRCGPLTDCWAFHYNVSSHGCQLLPWTQHSPHSRLWHSGRCDLFQKKDYIRTCIMNNGVGYRGTMATTVGGLSCQAWSHKFPNDHKYMPTLRNGLEENFCHNPDGDPGGPWCHTTDPAVRFQSCGIKSCRVAACVWCNGEEYRGAVDRTESGRECQRWDLQHPHQHPFEPGKYLDQGLDDNYCRNPDGSERPWCYTTDPQIEREFCDLPRCGSEAQPRQEATSVSCFRGKGEGYRGTANTTTAGVPCQRWDAQIPHQHRFTPEKYACKDLRENFCRNPDGSEAPWCFTLRPGMRVGFCYQIRRCTDDVRPQDCYHGAGEQYRGTVSKTRKGVQCQRASAETPHKPQFTFTSEPHAQLEENFCQDPDGDSHGPWCYTMDPRTPFDYCALRRCADDQPPSILDPPTDQVQFEKCGKRVDRLDQRRSKLRVAGGHPGNSPWTVSLGNRRQGQHFCGGSLVKEQWILTARQCFSSHMPLTGYEVWLGTLFQNPQHGEPGLQRVPVAKMLCGPSGSQLVLLKLERSVTLNQRVALICLPPE

SEQ ID NO: 453 - DNA, 1011 bp, Homo sapiens
  CDS (7)..(1005)
aagctttgcatcatgaacaatggggttgggtaccggggcaccatggccacgaccgtgggtggcctgccctgccaggcttggagccacaagttcccaaatgatcacaagtacacgcccactctccggaatggcctggaagagaacttctgccgtaaccctgatggcgaccccggaggtccttggtgctacacaacagaccctgctgtgcgcttccagagctgcggcatcgaatcctgccgggaggccgcgtgtgtctggtgcaatggcgaggaataccgcggcgcggtagaccgcacggagtcagggcgcgagtgccagcgctgggatcttcagcacccgcaccagcaccccttcgagccgggcaagttcctcgaccaaggtctggacgacaactattgccggaatcctgacggctccgagcggccatggtgctacactacggatccgcagatcgagcgagagttctgtgacctcccccgctgcgggtccgaggcacagccccgccaagaggccacaactgtcagctgcttccgcgggaagggtgagggctaccggggcacagccaataccaccactgcgggcgtaccttgccagcgttgggacgcgcaaatccctcatcagcaccgatttacgccagaaaaatacgcgtgcaaagaccttcgggagaacttctgccggaaccccgacggctcagaggcgccctggtgcttcacactgcggcccggcatgcgcgcggccttttgctaccagatccggcgttgtacagacgacgtgcggccccagggggagcagtaccgcggcacggtcagcaagacccgcaagggtgtccagtgccagcgctggtccgctgagacgccgcacaagccgcagttcacgtttacctccgaaccgcatgcacaactggaggagaacttctgccggaacccagatggggatagccatgggccctggtgctacacgatggacccaaggaccccattcgactactgtgccctgcgacgctgcctcgag

SEQ ID NO: 454 - protein, 333 aa, Homo sapiens
CIMNNGVGYRGTMATTVGGLPCQAWSHKFPNDHKYTPTLRNGLEENFCRNPDGDPGGPWCYTTDPAVRFQSCGIESCREAACVWCNGEEYRGAVDRTESGRECQRWDLQHPHQHPFEPGKFLDQGLDDNYCRNPDGSERPWCYTTDPQIEREFCDLPRCGSEAQPRQEATTVSCFRGKGEGYRGTANTTTAGVPCQRWDAQIPHQHRFTPEKYACKDLRENFCRNPDGSEAPWCFTLRPGMRAAFCYQIRRCTDDVRPQGEQYRGTVSKTRKGVQCQRWSAETPHKPQFTFTSEPHAQLEENFCRNPDGDSHGPWCYTMDPRTPFDYCALRRC

SEQ ID NO: 455 - DNA, 1881 bp, Homo sapiens
  CDS (76)..(1776)
acacattactgacatgtatgcccacctgacctgcacccactcatgcccactctgcagggcagcgctcgccattgaatgacttccaggtgctccggggcacagagctacctgctacatgcggtggtgcctgggccttggcaggaggatgtggcagatgctgaagagtgtgctggtcgctgtgggcccttaacggactgctgggccttccactacaatgtgagcagccatggttgccaactgctgccatggactcaacactcgccccactcaaggctgtggcattctgggcgctgtgacctcttccagaagaaagactacatacggacctgcatcatgaacaatggggttgggtaccggggcaccatggccacgaccgtgggtggcctgtcctgccaggcttggagccacaagttcccgaatgatcacaagtacatgcccacgctccggaatggcctggaagagaacttctgccataaccctgatggcgaccccggaggtccttggtgccacacaacagaccctgccgtgcgcttccagagctgcggcatcaaatcctgccgggtggccgcgtgtgtctggtgcaatggcgaggaataccgcggcgcggtagaccgcaccgagtcagggcgcgagtgccagcgctgggatcttcagcacccgcaccagcaccccttcgagccgggcaggttcctcgaccaaggtctggacgacaactattgccggaatcctgacggctccgagcggccatggtgctacactacggatccgcagatcgagcgagaattctgtgacctcccccgctgcggttccgaggcacagccccgccaagaggccacaagtgtcagctgcttccgcgggaagggtgagggctaccggggcacagccaataccaccaccgcgggcgtaccttgccagcgttgggacgcgcaaatcccgcatcagcaccgatttacgccagaaaaatacgcgtgcaaggaccttcgggagaacttctgccggaacctcgacggctcagaggcgccctggtgcttcacactgcggcccggcatgcgcgtgggcttttgctaccagatccggcgttgtacagacgacgtgcggccccaggactgctaccacggcgcgggggagcagtaccgcggcacggtcagcaagacccgcaagggtgtccagtgccagcgcgcgtccgctgagacgccgcacaagccgcagttcacgtttacctccgaaccgcatgcacaactggaggagaacttctgccagaccccagatggggatagccatgggccctggtgctacacgatggacccaaggaccccattcgactactgtgccctgcgacgctgcgctgatgaccagccgccatcaatcctggacccccccgaccaggtgcagtttgagaagtgtggcaagagggtggatcggctggatcagcgtcgttccaagctgcgcgtggctgggggccatccgggcaactcaccctggacagtcagcttggggaatcggcagggccagcatttctgcggggggtctctagtgaaggagcagtggatactgactgcccggcagtgcttctcctcccagcatatgcctctcacgggctatgaggtatggttgggcaccctgttccagaacccacaacatggagagccaggcctacagcgggtcccagtagccaagatgctgtgtgggccctcaggctcccagcttgtcctgctcaagctggagaggtctgtgaccctgaaccagcgtgtggccctgatctgcctgccgcctgaatgatatgtggtgcctccagggaccaagtgtgagattgcaggccggggtgagaccaaaggtaagagcatagtgcacaggactgctggtggccaggaggcccagccc

SEQ ID NO: 456 - protein, 567 aa, Homo sapiens
MTSRCSGAQSYLLHAVVPGPWQEDVADAEECAGRCGPLTDCWAFHYNVSSHGCQLLPWTQHSPHSRLWHSGRCDLFQKKDYIRTCIMNNGVGYRGTMATTVGGLSCQAWSHKFPNDHKYMPTLRNGLEENFCHNPDGDPGGPWCHTTDPAVRFQSCGIKSCRVAACVWCNGEEYRGAVDRTESGRECQRWDLQHPHQHPFEPGRFLDQGLDDNYCRNPDGSERPWCYTTDPQIEREFCDLPRCGSEAQPRQEATSVSCFRGKGEGYRGTANTTTAGVPCQRWDAQIPHQHRFTPEKYACKDLRENFCRNLDGSEAPWCFTLRPGMRVGFCYQIRRCTDDVRPQDCYHGAGEQYRGTVSKTRKGVQCQRASAETPHKPQFTFTSEPHAQLEENFCQTPDGDSHGPWCYTMDPRTPFDYCALRRCADDQPPSILDPPDQVQFEKCGKRVDRLDQRRSKLRVAGGHPGNSPWTVSLGNRQGQHFCGGSLVKEQWILTARQCFSSQHMPLTGYEVWLGTLFQNPQHGEPGLQRVPVAKMLCGPSGSQLVLLKLERSVTLNQRVALICLPPE

SEQ ID NO: 457 - DNA, 1567 bp, Homo sapiens
  CDS (2)..(1522)
tatggggtgttggggtcggaaccggggccggctgctgtgcatgctggcgctgaccttcatgttcatggtgctggaggtggtggtgagccgggtgacctcgtcgctggcgatgctctccgactccttccacatgctgtcggacgtgctggcgctggtggtggcgctggtggccgagcgcttcgcccggcggacccacgccacccagaagaacacgttcggctggatccgagccgaggtaatgggggctctggtgaacgccatcttcctgactggcctctgtttcgccatcctgctggaggccatcgagcgcttcatcgagccgcacgagatgcagcagccgctggtggtccttggggtcggcgtggccgggctgctggtcaacgtgctggggctctgcctcttccaccatcacagcggcttcagccaggactccggccacggccactcgcacgggggtcacggctacggccacggcctccccaaggggcctcgcgttaagagcacccgccccgggagcagcgacatcaacgtggccccgggcgagcagggtcccgaccaggaggagaccaacaccctggtggccaataccagcaactccaacgggctgaaattggaccccgcagacccagaaaaccccagaagtggtgatacagtggaagtacaagtgaatggaaatcttgtcagagaacctgaccatatggaactggaagaagatagggctggacaacttaacatgcgtggagtttttctgcatgtccttggagatgccttgggttcagtgattgtagtagtaaatgccttagtcttttacttttcttggaaaggttgttctgaaggggatttttgtgtgaatccatgtttccctgacccctgcaaagcatttgtagaaataattaatagtactcatgcatcagtttatgaggctggtccttgctgggtgctatatttagatccaactctttgtgttgtaatggtttgtatacttctttacacaacctatccattacttaaggaatctgctcttattcttctacaaactgttcctaaacaaattgatatcagaaatttgataaaagaacttcgaaatgttgaaggagttgaggaagttcatgaattacatgtttggcaacttgctggaagcagaatcattgccactgctcacataaaatgtgaagatccaacatcatacatggaggtggctaaaaccattaaagacgtttttcataatcacggaattcacgctactaccattcagcctgaatttgctagtgtaggctctaaatcaagtgtagttccgtgtgaacttgcctgcagaacccagtgtgctttgaagcaatgttgtgggacactaccacaagccccttctggaaaggatgcagaaaagaccccagcagttagcatttcttgtttagaacttagtaacaatctagagaagaagcccaggaggactaaagctgaaaacatccctgctgttgtgatagagattaaaaacatgccaaacaaacaacctgaatcatctttgtgagtcttgaaaaagatgtgatatttgacttttgctttaaactgc

SEQ ID NO: 458 - protein, 507 aa, Homo sapiens
MGCWGRNRGRLLCMLALTFMFMVLEVVVSRVTSSLAMLSDSFHMLSDVLALVVALVAERFARRTHATQKNTFGWIRAEVMGALVNAIFLTGLCFAILLEAIERFIEPHEMQQPLVVLGVGVAGLLVNVLGLCLFHHHSGFSQDSGHGHSHGGHGYGHGLPKGPRVKSTRPGSSDINVAPGEQGPDQEETNTLVANTSNSNGLKLDPADPENPRSGDTVEVQVNGNLVREPDHMELEEDRAGQLNMRGVFLHVLGDALGSVIVVVNALVFYFSWKGCSEGDFCVNPCFPDPCKAFVEIINSTHASVYEAGPCWVLYLDPTLCVVMVCILLYTTYPLLKESALILLQTVPKQIDIRNLIKELRNVEGVEEVHELHVWQLAGSRIIATAHIKCEDPTSYMEVAKTIKDVFHNHGIHATTIQPEFASVGSKSSVVPCELACRTQCALKQCCGTLPQAPSGKDAEKTPAVSISCLELSNNLEKKPRRTKAENIPAVVIEIKNMPNKQPESSL

SEQ ID NO: 459 - DNA, 1665 bp, Homo sapiens
  CDS (77)..(1597)
cgaccctccgcgtcccgccaacgccgccgctgcaccagtctccgggccgggctcggcgggccccgcagccgcagccatggggtgttggggtcggaaccggggccggctgctgtgcatgctggcgctgaccttcatgttcatggtgctggaggtggtggtgagccgggtgacctcgtcgctggcgatgctctccgactccttccacatgctgtcggacgtgctggcgctggtggtggcgctggtggccgagcgcttcgcccggcggacccacgccacccagaagaacacgttcggctggatccgagccgaggtaatgggggctctggtgaacgccatcttcctgactggcctctgtttcgccatcctgctggaggccatcgagcgcttcatcgagccgcacgagatgcagcagccgctggtggtccttggggtcggcgtggccgggctgctggtcaacgtgctggggctctgcctcttccaccatcacagcggcttcagccaggactccggccacggccactcgcacgggggtcacggccacggccacggcctccccaaggggcctcgcgttaagagcacccgccccgggagcagcgacatcaacgtggccccgggcgagcagggtcccgaccaggaggagaccaacaccctggtggccaataccagcaactccaacgggctgaaattggaccccgcggacccagaaaaccccagaagtggtgatacagtggaagtacaagtgaatggaaatcttgtcagagaacctgaccatatggaactggaagaagatagggctggacaacttaacatgcgtggagtttttctgcatgtccttggagatgccttgggttcagtgattgtagtagtaaatgccttagtcttttacttttcttggaaaggttgttctgaaggggatttttgtgtgaatccatgtttccctgacccctgcaaagcatttgtagaaataattaatagtactcatgcatcagtttatgaggctggtccttgctgggtgctatatttagatccaactctttgtgttgtaatggtttgtatacttctttacacaacctatccattacttaaggaatctgctcttattcttctacaaactgttcctaaacaaattgatatcagaaatttgataaaagaacttcgaaatgttgaaggagttgaggaagttcatgaattacatgtttggcaacttgctggaagcagaatcattgccactgctcacataaaatgtgaagatccaacatcatacatggaggtggctaaaaccattaaagacgtttttcataatcacggaattcacgctactaccattcagcctgaatttgctagtgtaggctctaaatcaagtgtagttccgtgtgaacttgcctgcagaacccagtgtgctttgaagcaatgttgtgggacactaccacaagccccttctggaaaggatgcagaaaagaccccagcagttagcatttcttgtttagaacttagtaacaatctagagaagaagcccaggaggactaaagctgaaaacatccctgctgttgtgatagagattaaaaacatgccaaacaaacaacctgaatcatctttgtgagtcttgaaaaagatgtgatatttgacttttgctttaaactgcaagaggaaaaagactccactgaa

SEQ ID NO: 460 - protein, 507 aa, Homo sapiens
MGCWGRNRGRLLCMLALTFMFMVLEVVVSRVTSSLAMLSDSFHMLSDVLALVVALVAERFARRTHATQKNTFGWIRAEVMGALVNAIFLTGLCFAILLEAIERFIEPHEMQQPLVVLGVGVAGLLVNVLGLCLFHHHSGFSQDSGHGHSHGGHGHGHGLPKGPRVKSTRPGSSDINVAPGEQGPDQEETNTLVANTSNSNGLKLDPADPENPRSGDTVEVQVNGNLVREPDHMELEEDRAGQLNMRGVFLHVLGDALGSVIVVVNALVFYFSWKGCSEGDFCVNPCFPDPCKAFVEIINSTHASVYEAGPCWVLYLDPTLCVVMVCILLYTTYPLLKESALILLQTVPKQIDIRNLIKELRNVEGVEEVHELHVWQLAGSRIIATAHIKCEDPTSYMEVAKTIKDVFHNHGIHATTIQPEFASVGSKSSVVPCELACRTQCALKQCCGTLPQAPSGKDAEKTPAVSISCLELSNNLEKKPRRTKAENIPAVVIEIKNMPNKQPESSL

SEQ ID NO: 461 - DNA, 1567 bp, Homo sapiens
  CDS (2)..(1522)
tatggggtgttggggtcggaaccggggccggctgctgtgcatgctggcgctgaccttcatgttcatggtgctggaggtggtggtgagccgggtgacctcgtcgctggcgatgctctccgactccttccacatgctgtcggacgtgctggcgctggtggtggcgctggtggccgagcgcttcgcccggcggacccacgccacccagaagaacacgttcggctggatccgagccgaggtaatgggggctctggtgaacgccatcttcctgactggcctctgtttcgccatcctgctggaggccatcgagcgcttcatcgagccgcacgagatgcagcagccgctggtggtccttggggtcggcgtggccgggctgctggtcaacgtgctggggctctgcctcttccaccatcacagcggcttcagccaggactccggccacggccactcgcacgggggtcacggccacggccacggcctccccaaggggcctcgcgttaagagcacccgccccgggagcagcgacatcaacgtggccccgggcgagcagggtcccgaccaggaggagaccaacaccctggtggccaataccagcaactccaacgggctgaaattggaccccgcagacccagaaaaccccagaagtggtgatacagtggaagtacaagtgaatggaaatcttgtcagagaacctgaccatatggaactggaagaagatagggctggacaacttaacatgcgtggagtttttctgcatgtccttggagatgccttgggttcagtgattgtagtagtaaatgccttagtcttttacttttcttggaaaggttgttctgaaggggatttttgtgtgaatccatgtttccctgacccctgcaaagcatttgtagaaataattaatagtactcatgcatcagtttatgaggctggtccttgctgggtgctatatttagatccaactctttgtgttgtaatggtttgtatacttctttacacaacctatccattacttaaggaatctgctcttattcttctacaaactgttcctaaacaaattgatatcagaaatttgataaaagaacttcgaaatgttgaaggagttgaggaagttcatgaattacatgtttggcaacttgctggaagcagaatcattgccactgctcacataaaatgtgaagatccaacatcatacatggaggtggctaaaaccattaaagacgtttttcataatcacggaattcacgctactaccattcagcctgaatttgctagtgtaggctctaaatcaagtgtagttccgtgtgaacttgcctgcagaacccagtgtgctttgaagcaatgttgtgggacactaccacaagccccttctggaaaggatgcagaaaagaccccagcagttagcatttcttgtttagaacttagtaacaatctagagaagaagcccaggaggactaaagctgaaaacatccctgctgttgtgatagagattaaaaacatgccaaacaaacaacctgaatcatctttgtgagtcttgaaaaagatgtgatatttgacttttgctttaaactgc

SEQ ID NO: 462 - protein, 507 aa, Homo sapiens; identical to SEQ ID NO: 460

SEQ ID NO: 463 - DNA, 1416 bp, Homo sapiens
  CDS (4)..(1401)
  misc_feature (1348)..(1348): Wherein n may be a, c, g or t
  misc_feature (1348)..(1350): Wherein Xaa may be Ile or Leu or Val
gagatggtcctggctttccagttagtctccttcacctacatctggatcatattgaaaccaaatgtttgtgctgcttctaacatcaagatgacacaccagcggtgctcctcttcaatgaaacaaacccaagaaactagaatgaagaaagatgacagtaccaaagcgcggcctcagaaatatgagcaacttctccatatagaggacaacgatttcgcaatgagacctggatttggagggtctccagtgccagtaggtatagatgtccatgttgaaagcattgacagcatttcagagactaacatggtagactttacaatgactttttatctcaggcattactggaaagacgagaggctctcctttcctagcacagcaaacaaaagcatgacatttgatcatagattgaccagaaagatctgggtgcctgatatcttttttgtccactctaaaagatccttcatccatgatacaactatggagaatatcatgctgcgcgtacaccctgatggaaacgtcctcctaagtctcaggataacggtttcggccatgtgctttatggatttcagcaggtttcctcttgacactcaaaattgttctcttgaactggaaagcgcctacaatgaggatgacctaatgctatactggaaacacggaaacaagtccttaaatactgaagaacatatgtccctttctcagttcttcattgaagacttcagtgcatctagtggattagctttctatagcagcacaggttggtacaataggcttttcatcaactttgtgctaaggaggcatgttttcttctttgtgctgcaaacctatttcccagccatattgatggtgatgctttcatgggtttcattttggattgaccgaagagctgttcctgcaagagtttccctgggtggaatcaccacagtgctgaccatgtccacaatcatcactgctgtgagcgcctccatgccccaggtgtcctacctcaaggctgtggatgtgtacctgtgggtcagctccctctttgtgttcctgtcagtcattgagtatgcagctgtgaactacctcaccacagtggaagagcggaaacaattcaagaagacaggaaagatttctaggatgtacaatattgatgcagttcaagctatggcctttgatggttgttaccatgacagcgagattgacatggaccagacttccctctctctaaactcagaagacttcatgagaagaaaatcgatatgcagccccagcaccgattcatctcggataaagagaagaaaatccctaggaggacatgttggtagaatcattctggaaaacaaccatgtcattgacacctattctaggattntattccccattgtgtatatcttatttaatttgttttactggggtgtatatgtatgaaggggaatttca

SEQ ID NO: 464 - protein, 466 aa, Homo sapiens
  misc_feature (449)..(449): Wherein Xaa may be any naturally occurring amino acid
MVLAFQLVSFTYIWIILKPNVCAASNIKMTHQRCSSSMKQTQETRMKKDDSTKARPQKYEQLLHIEDNDFAMRPGFGGSPVPVGIDVHVESIDSISETNMVDFTMTFYLRHYWKDERLSFPSTANKSMTFDHRLTRKIWVPDIFFVHSKRSFIHDTTMENIMLRVHPDGNVLLSLRITVSAMCFMDFSRFPLDTQNCSLELESAYNEDDLMLYWKHGNKSLNTEEHMSLSQFFIEDFSASSGLAFYSSTGWYNRLFINFVLRRHVFFFVLQTYFPAILMVMLSWVSFWIDRRAVPARVSLGGITTVLTMSTIITAVSASMPQVSYLKAVDVYLWVSSLFVFLSVIEYAAVNYLTTVEERKQFKKTGKISRMYNIDAVQAMAFDGCYHDSEIDMDQTSLSLNSEDFMRRKSICSPSTDSSRIKRRKSLGGHVGRIILENNHVIDTYSRIXFPIVYILFNLFYWGVYV

SEQ ID NO: 465 - DNA, 1875 bp, Homo sapiens
  CDS (10)..(1410)
ttggaagagatggtcctggctttccagttagtctccttcacctacatctggatcatattgaaaccaaatgtttgtgctgcttctaacatcaagatgacacaccagcggtgctcctcttcaatgaaacaaacctggatgcaagaaactagaatgaagaaagatgacagtaccaaagcgcggcctcagaaatatgagcaacttctccatatagaggacaacgatttcgcaatgagacctggatttggaggttctccagtgccagtaggtatagatgtccatgttgaaagcattgacagcatttcagagactaacatggactttacaatgactttttatctcaggcattactggaaagacgagaggctctcctttcctagcacagcaaacaaaagcatgacatttgatcatagacacttgcggtattcgttattcatcagaaggctgtatctgttatactgccagaggtctttcttctcaccctcatccatacttccctcatctccagacatccatgcacctggtacatctaaaagcagtttgtctgatagccttgtatgtatatctgaaaaaaacttgccaggacacagtaaaaacacacctcttgcaatgtcagatgtagcctacaatgaggatgacctaatgctatactggaaacacggaaacaagtccttaaatactgaagaacatatgtccctttctcagttcttcattgaagacttcagtgcatctagtggattagctttctatagcagcacaggtacagcattttacatgggtgattcatcagcatttattggacatctactgtttttgatctggagttccaggaaaagaccaggtttagagatgttgggtttgggaattctcagaatctgggtaataactagagccatggataagaaaatggaaatgggaatcaccacagtgctgaccatgtccacaatcatcactgctgtgagcgcctccatgccccaggtgtcctacctcaaggctgtggatgtgtacctgtgggtcagctccctctttgtgttcctgtcagtcattgagtatgcagctgtgaactacctcaccacagtggaagagcggaaacaattcaaaaaaagtttttcaaagatttctaggatgtacaatattgatgcagttcaagctatggcctttgatggttgttaccatgacagcgagattgacatggaccagacttccctctctctaaactcagaagacttcatgagaagaaaatcgatatgcagccccagcaccgattcatctcggataaagagaagaaaatccctaggaggacatgttggtagaatcattctggaaaacaaccatgtcattgacacctattctaggattttattccccattgtgtatatcttttttaatttgttttactggggtgtatatgtatgaaggggaatttcaaatgtatacaactttaaagccagatgatgtttaaaaacaaaactcttgaatatgagttggatagtcctagatggaactgggaaagagcaagtcacctctcctgccctaatgaaaatttgaaagctgtctgatttacatctaagaaagagtttaggtcctagaaaagtttgactccataaataagagtcataggcatgtgtattatgggaaaaacagttttccattgggaagggctttataactacttcatctgaaccctccttctttcttaatgaaatgttctttatttaactagggaagaaagctggactataacaataattcaaagatattttgtttcttagtgccagccaagtgcctggttatctaccagagctcaaccgtcctaggcaagaacatccacatagaggtggtatcatccacactcacacagctgagaatcctatgaag

SEQ ID NO: 466 - protein, 467 aa, Homo sapiens
MVLAFQLVSFTYIWIILKPNVCAASNIKMTHQRCSSSMKQTWMQETRMKKDDSTKARPQKYEQLLHIEDNDFAMRPGFGGSPVPVGIDVHVESIDSISETNMDFTMTFYLRHYWKDERLSFPSTANKSMTFDHRHLRYSLFIRRLYLLYCQRSFFSPSSILPSSPDIHAPGTSKSSLSDSLVCISEKNLPGHSKNTPLAMSDVAYNEDDLMLYWKHGNKSLNTEEHMSLSQFFIEDFSASSGLAFYSSTGTAFYMGDSSAFIGHLLFLIWSSRKRPGLEMLGLGILRIWVITRAMDKKMEMGITTVLTMSTIITAVSASMPQVSYLKAVDVYLWVSSLFVFLSVIEYAAVNYLTTVEERKQFKKSFSKISRMYNIDAVQAMAFDGCYHDSEIDMDQTSLSLNSEDFMRRKSICSPSTDSSRIKRRKSLGGHVGRIILENNHVIDTYSRILFPIVYIFFNLFYWGVYV

SEQ ID NO: 467 - DNA, 1444 bp, Homo sapiens
  CDS (21)..(1424)
gtttttttgttttggaagagatggtcctggctttccagttagtctccttcacctacatctggatcatattgaaaccaaatgtttgtgctgcttctaacatcaagatgacacaccagcggtgctcctcttcaatgaaacaaacctgcaaacaagaaactagaatgaagaaagatgacagtaccaaagcgcggcctcagaaatatgagcaacttctccatatagaggacaacgatttcgcaatgagacctggatttggagggtctccagtgccagtaggtatagatgcccatgttgaaagcattgacagcatttcagagactaacatggactttacaatgactttttatctcaggcattactggaaagacgagaggctctcctttcctagcacagcaaacaaaagcatgacatttgatcatagattgaccagaaagatctgggtgcctgatatcttttttgtccactctaaaagatccttcatccatgatacaactatggagaatatcatgctgcgcgtacaccctgatggaaacgtcctcctaagtctcaggataacggtttcggccatgtgctttatggatttcagcaggtttcctcttgacgacactcaaaattgttctcttgaactggaaagctgtgcctacaatgaggatgacctaatgctatactggaaacacggaaacaagtccttaaatactgaagaacatatgtccctttctcagttcttcattgaagacttcagtgcatctagtggattagctttctatagcagcacaggttggtacaataggcttttcatcaactttgtgctaaggaggcatgttttcttctttgtgctgcaaacctatttcccagccatattgatggtgatgctttcatgggtttcattttggattgaccgaagagctgttcctgcaagagtttccctgggtatcaccacagtgctgaccatgtccacaatcatcactgctgtgagcgcctccatgccccaggtgtcctacctcaaggctgtggatgtgtacctgtgggtcagctccctctttgtgttcctgtcagtcattgagtatgcagctgtgaactacctcaccacagtggaagagcggaaacaattcaagaagacaggaaaggtatctaggatgtacaatattgatgcagttcaagctatggcctttgatggttgttaccatgacagcgagattgacatggaccagacttccctctctctaaactcagaagacttcatgagaagaaaatcgatatgcagccccagcaccgattcatctcggataaagagaagaaaatccctaggaggacatgttggtagaatcattctggaaaacaaccatgtcattgacacctattctaggattttattccccattgtgtatattttatttaatttgttttactggggtgtatatgtatgaaggggaatttcaaatgt

SEQ ID NO: 468 - protein, 468 aa, Homo sapiens
MVLAFQLVSFTYIWIILKPNVCAASNIKMTHQRCSSSMKQTCKQETRMKKDDSTKARPQKYEQLLHIEDNDFAMRPGFGGSPVPVGIDAHVESIDSISETNMDFTMTFYLRHYWKDERLSFPSTANKSMTFDHRLTRKIWVPDIFFVHSKRSFIHDTTMENIMLRVHPDGNVLLSLRITVSAMCFMDFSRFPLDDTQNCSLELESCAYNEDDLMLYWKHGNKSLNTEEHMSLSQFFIEDFSASSGLAFYSSTGWYNRLFINFVLRRHVFFFVLQTYFPAILMVMLSWVSFWIDRRAVPARVSLGITTVLTMSTIITAVSASMPQVSYLKAVDVYLWVSSLFVFLSVIEYAAVNYLTTVEERKQFKKTGKVSRMYNIDAVQAMAFDGCYHDSEIDMDQTSLSLNSEDFMRRKSICSPSTDSSRIKRRKSLGGHVGRIILENNHVIDTYSRILFPIVYILFNLFYWGVYV

SEQ ID NO: 469 - DNA, 1438 bp, Homo sapiens
  CDS (21)..(1418)
gtttttttgttttggaagagatggtcctggctttccagttagtctccttcacctacatctggatcatattgaaaccaaatgtttgtgctgcttctaacatcaagatgacacaccagcggtgctcctcttcaatgaaacaaacctgcaaacaagaaactagaatgaagaaagatgacagtaccaaagcgcggcctcagaaatatgagcaacttctccatatagaggacaacgatttcgcaatgagacctggatttggagggtctccagtgccagtaggtatagatgtccatgttgaaagcattgacagcatttcagagactaacatggactttacaatgactttttatctcaggcattactggaaagacgagaggctctcctttcctagcacagcaaacaaaagcatgacatttgatcatagattgaccagaaagatctgggtgcctgatatcttttttgtccactctaaaagatccttcatccatgatacaactatggagaatatcatgctgcgcgtacaccctgatggaaacgtcctcctaagtctcaggataacggtttcggccatgtgctttatggatttcagcaggtttcctctgactcaaaattgttctcttgaactggaaagctgtgcctacaatgaggatgacctaatgctatactggaaacacggaaacaagtccttaaatactgaagaacatatgtccctttctcagttcttcattgaagacttcagtgcatctagtggattagctttctatagcagcacaggttggtacaataggcttttcatcaactttgtgctaaggaggcatgttttcttctttgtgctgcaaacctatttcccagccatattgatggtgatgctttcatgggtttcattttggattgaccgaagagctgttcctgcaagagtttccctgggtatcaccacagtgctgaccatgtccacaatcatcactgctgtgagcgcctccatgccccaggtgtcctacctcaaggctgtggatgtgtacctgtgggtcagctccctctttgtgttcctgtcagtcattgagtatgcagctgtgaactacctcaccacagtggaagagcggaaacaattcaagaagacaggaaaggtatctaggatgtacaatattgatgcagttcaagctatggcctttgatggttgttaccatgacagcgagattgacatggaccagacttccctctctctaaactcagaagacttcatgagaagaaaatcgatatgcagccccagcaccgattcatctcggataaagagaagaaaatccctaggaggacatgttggtagaatcattctggaaaacaaccatgtcattgacacctattctaggattttattccccattgtgtatattttatttaatttgttttactggggtgtatatgtatgaaggggaatttcaaatgt

SEQ ID NO: 470 - protein, 466 aa, Homo sapiens
MVLAFQLVSFTYIWIILKPNVCAASNIKMTHQRCSSSMKQTCKQETRMKKDDSTKARPQKYEQLLHIEDNDFAMRPGFGGSPVPVGIDVHVESIDSISETNMDFTMTFYLRHYWKDERLSFPSTANKSMTFDHRLTRKIWVPDIFFVHSKRSFIHDTTMENIMLRVHPDGNVLLSLRITVSAMCFMDFSRFPLTQNCSLELESCAYNEDDLMLYWKHGNKSLNTEEHMSLSQFFIEDFSASSGLAFYSSTGWYNRLFINFVLRRHVFFFVLQTYFPAILMVMLSWVSFWIDRRAVPARVSLGITTVLTMSTIITAVSASMPQVSYLKAVDVYLWVSSLFVFLSVIEYAAVNYLTTVEERKQFKKTGKVSRMYNIDAVQAMAFDGCYHDSEIDMDQTSLSLNSEDFMRRKSICSPSTDSSRIKRRKSLGGHVGRIILENNHVIDTYSRILFPIVYILFNLFYWGVYV

SEQ ID NO: 471 - DNA, 1799 bp, Homo sapiens
  CDS (71)..(1444)
aagaagaaactgtgatcacagtattggttgcgttcacctgcatcctttctgtttttttgttttggaagagatggtcctggctttccagttagtctccttcacctacatctggatcatattggtttgtgctgcttctaacatcaagatgacacaccagcggtgctcctcttcaatgaaacaaaccgtaagatgctcaatgaagaaagatgacagtaccaaagcgcggcctcagaaatatgagcaacttctccatatagaggacaacgatttcgcaatgagacctggatttggaggttctccagtgccagtaggtatagatgtccatgttgaaagcattgacagcatttcagagactaacatggactttacaatgactttttatctcaggcattactggaaagacgagaggctctcctttcctagcacagcaaacaaaagcatgacatttgatcatagaaagagtatcccccgccctgaacacttgcggtattcgttattcatcagaaggctgtatctgttatactgccagaggtctttcttctcaccctcatccatacttccctcatctccagacatccatgcacctggtacatctaaaagcagtttgtctgatagccttgtatgtatatctgaaaaaaacttgccaggacacagtaaaaacacacctcttgcaatggcctacaatgaggatgacctaatgctatactggaaacacggaaacaagtccttaaatactgaagaacatatgtccctttctcagttcttcattgaagacttcagtgcatctagtggattagctttctatagcagcacaggtacagcattttacatgggtgattcatcagcatttattggacatctactgtttttaaatagacatttacatttcttcatcataaattttgaaattactcaaatattgatgattggaatcaccacagtgctgaccatgtccacaatcatcactgctgtgagcgcctccatgccccaggtgtcctacctcaaggctgtggatgtgtacctgtgggtcagctccctctttgtgttcctgtcagtcattgagtatgcagctgtgaactacctcaccacagtggaagagcggaaacaattcaagaagacaggaaaggtacagatttctaggatgtacaatattgatgcagttcaagctatggcctttgatggttgttaccatgacagcgagattgacatggaccagacttccctctctctaaactcagaagacttcatgagaagaaaatcgatatgcagccccagcaccgattcatctcggataaagagaagaaaatccctaggaggacatgttggtagaatcattctggaaaacaaccatgtcattgacacctattctaggattttattccccattgtgtatatcccattgtgtatatctttatttaatttgttttactggggtgtatatgtatgaaggggaatttcaaatgtatacaactttaaagccagatgatgtttaaaaacaaaactcttgaatatgagttggaattgaagacttcagtgcatctagtggattagctttctatagcagcacaggtacagcattttacatgggtgattcatcagcatttattggacatctactgttttacttttggtctttgatgatggtgatgtacagatgggttggaatcaccacagtgctgaccatgtccacaatcatcactgctgtgagcgcctccatgccccaggtgtcctacctcaaggctgtggatgtgtacctgtgggtcagctccctctttgtgttcctgtcagtcattgagtat

SEQ ID NO: 472 - protein, 458 aa, Homo sapiens
MVLAFQLVSFTYIWIILVCAASNIKMTHQRCSSSMKQTVRCSMKKDDSTKARPQKYEQLLHIEDNDFAMRPGFGGSPVPVGIDVHVESIDSISETNMDFTMTFYLRHYWKDERLSFPSTANKSMTFDHRKSIPRPEHLRYSLFIRRLYLLYCQRSFFSPSSILPSSPDIHAPGTSKSSLSDSLVCISEKNLPGHSKNTPLAMAYNEDDLMLYWKHGNKSLNTEEHMSLSQFFIEDFSASSGLAFYSSTGTAFYMGDSSAFIGHLLFLNRHLHFFIINFEITQILMIGITTVLTMSTIITAVSASMPQVSYLKAVDVYLWVSSLFVFLSVIEYAAVNYLTTVEERKQFKKTGKVQISRMYNIDAVQAMAFDGCYHDSEIDMDQTSLSLNSEDFMRRKSICSPSTDSSRIKRRKSLGGHVGRIILENNHVIDTYSRILFPIVYIPLCISLFNLFYWGVYV

SEQ ID NO: 473 - DNA, 1125 bp, Homo sapiens
  CDS (1)..(1110)
atggaggccgctagcctttcagtggccaccgccggcgttgcccttgccctgggacccgagaccagcagcgggaccccaagcccgagagggatactcggttcgaccccgagcggcgccgtcctgccgggccgagggccgcccttctctgtcttcacggtcctggtggtgacgctgctagtgctgctgatcgctgccactttcctgtggaacctgctggttccggtcaccatcccgcgggtccgtgccttccaccgcgtgccgcataacttggtggcctcgacggccgtctcggacgaactagtggcagcgctggcgatgccaccgagcctggcgagtgagctgtcgaccgggcgacgtcggctgctgggccggagcctgtgccacgtgtggatctccttcgacgccctgtgctgccccgccggcctcgggaacgtggcggccatcgccctgggccgcgacggggccatcacacggcacctgcagcacacgctgcgcacccgcagccgcgcctcgttgctcatgatcgcgctcgcccgggtgccgtcggcgctcatcgccctcgcgccgctgctctttggccggggcgaggtgtgcgacgctcggctccagcgctgccaggtgagccgggaaccctcctatgccgccttctccacccgcggcgccttccacctgccgcttggcgtggtgccgtttgtctaccggaagatctacgaggcggccaagtttcgtttcggccgccgccggagagctgtgctgccgttgccggccaccatgcaggtgaaggaagcacctgatgaggctgaagtggtgttcacggcacattgcaaagcaacggtgtccttccaggtgagcggggactcctggcgggagcagaaggagaggcgagcagccatgatggtgggaattctgattggcgtgtttgtgctgtgctggatccccttcttcctgacggaactcatcagcccactctgtgcctgcagcctgccccccatctggaaaagcatatttctgtggcttggctactccaattctttcttcaaccccctgatttacacagcttttaacaagaactacaacaatgccttcaagagcctctttactaagcagagatgaacacaggggtta

SEQ ID NO: 474 - protein, 370 aa, Homo sapiens
MEAASLSVATAGVALALGPETSSGTPSPRGILGSTPSGAVLPGRGPPFSVFTVLVVTLLVLLIAATFLWNLLVPVTIPRVRAFHRVPHNLVASTAVSDELVAALAMPPSLASELSTGRRRLLGRSLCHVWISFDALCCPAGLGNVAAIALGRDGAITRHLQHTLRTRSRASLLMIALARVPSALIALAPLLFGRGEVCDARLQRCQVSREPSYAAFSTRGAFHLPLGVVPFVYRKIYEAAKFRFGRRRRAVLPLPATMQVKEAPDEAEVVFTAHCKATVSFQVSGDSWREQKERRAAMMVGILIGVFVLCWIPFFLTELISPLCACSLPPIWKSIFLWLGYSNSFFNPLIYTAFNKNYNNAFKSLFTKQR

SEQ ID NO: 475 - DNA, 1150 bp, Homo sapiens
  CDS (24)..(1133)
ctggagctgcgatcccaagcgccatggaggccgctagcctttcagtggccaccgccggcgttgcccttgccctgggacccgagaccagcagcgggaccccaagcccgagagggatactcggttcgaccccgagcggcgccgtcctgccgggccgagggccgcccttctctgtcttcacggtcctggtggtgacgctgctagtgctgctgatcgctgccactttcctgtggaacctgctggttccggtcaccatcccgcgggtccgtgccttccaccgcgtgccgcataacttggtggcctcgacggccgtctcggacgaactagtggcagcgctggcgatgccaccgagcctggcgagtgagctgtcgaccgggcgacgtcggctgctgggccggagcctgtgccacgtgtggatctccttcgacgccctgtgctgccccgccggcctcgggaacgtggcggccatcgccctgggccgcgacggggccatcacacggcacctgcagcacacgctgcgcacccgcagccgcgcctcgttgctcatgatcgcgctcgcccgggtgccgtcggcgctcatcgccctcgcgccgctgctctttggccggggcgaggtgtgcgacgctcggctccagcgctgccaggtgagccgggaaccctcctatgccgccttctccacccgcggcgccttccacctgccgcttggcgtggtgccgtttgtctaccggaagatctacgaggcggccaagtttcgtttcggccgccgccggagagctgtgctgccgttgccggccacctccaaggtaaaggaagcacctgatgaggctgaagtggtgttcacggcacattgcaaagcaacggtgtccttccaggtgagcggggactcctggcgggagcagaaggagaggcgagcagccatgatggtgggaattctgattggcgtgtttgtgctgtgctggatccccttcttcctgacggaactcatcagcccactctgtgcctgcagcctgccccccatctggaaaagcatatttctgtggcttggctactccaattctttcttcaaccccctgatttacacagcttttaacaagaactacaacaatgccttcaagagcctctttactaagcagagatgaacacaggggttaga

SEQ ID NO: 476 - protein, 370 aa, Homo sapiens
MEAASLSVATAGVALALGPETSSGTPSPRGILGSTPSGAVLPGRGPPFSVFTVLVVTLLVLLIAATFLWNLLVPVTIPRVRAFHRVPHNLVASTAVSDELVAALAMPPSLASELSTGRRRLLGRSLCHVWISFDALCCPAGLGNVAAIALGRDGAITRHLQHTLRTRSRASLLMIALARVPSALIALAPLLFGRGEVCDARLQRCQVSREPSYAAFSTRGAFHLPLGVVPFVYRKIYEAAKFRFGRRRRAVLPLPATSKVKEAPDEAEVVFTAHCKATVSFQVSGDSWREQKERRAAMMVGILIGVFVLCWIPFFLTELISPLCACSLPPIWKSIFLWLGYSNSFFNPLIYTAFNKNYNNAFKSLFTKQR

SEQ ID NO: 477 - DNA, 1150 bp, Homo sapiens
  CDS (24)..(1133)
ctggagctgcgatcccaagcgccatggaggccgctagcctttcagtggccaccgccggcgttgcccttgccctgggacccgagaccagcagcgggaccccaagcccgagagggatactcggttcgaccccgagcggcgccgtcctgccgggccgagggccgcccttctctgtcttcacggtcctggtggtgacgctgctagtgctgctgatcgctgccactttcctgtggaacctgctggttccggtcaccatcccgcgggtccgtgccttccaccgcgtgccgcataacttggtggcctcgacggccgtctcggacgaactagtggcagcgctggcgatgccaccgagcctggcgagtgagctgtcgaccgggcgacgtcggctgctgggccggagcctgtgccacgtgtggatctccttcgacgccctgtgctgccccgccggcctcgggaacgtggcggccatcgccctgggccgcgacggggccatcacacggcacctgcagcacacgctgcgcacccgcagccgcgcctcgttgctcatgatcgcgctcgcccgggtgccgtcggcgctcatcgccctcgcgccgctgctctttggccggggcgaggtgtgcgacgctcggctccagcgctgccaggtgagccgggaaccctcctatgccgccttctccacccgcggcgccttccacctgccgcttggcgtggcgccgtttgtctaccggaagatctacgaggcggccaagtttcgtttcggccgccgccggagagctgtgctgccgttgccggccaccatgcaagtaaaggaagcacctgatgaggctgaagtggtgttcacggcacattgcaaagcaacggtgtccttccaggtgagcggggactcctggcgggagcagaaggagaggcgagcagccatgatggtgggaattctgattggcgtgtttgtgctgtgctggatccccttcttcctgacggaactcatcagcccactctgtgcctgcagcctgccccccatctggaaaagcatatttctgtggcttggctactccaattctttcttcaaccccctgatttacacagcttttaacaagaactacaacaatgccttcaagagcctctttactaagcagagatgaacacaggggttaga

SEQ ID NO: 478 - protein, 370 aa, Homo sapiens
MEAASLSVATAGVALALGPETSSGTPSPRGILGSTPSGAVLPGRGPPFSVFTVLVVTLLVLLIAATFLWNLLVPVTIPRVRAFHRVPHNLVASTAVSDELVAALAMPPSLASELSTGRRRLLGRSLCHVWISFDALCCPAGLGNVAAIALGRDGAITRHLQHTLRTRSRASLLMIALARVPSALIALAPLLFGRGEVCDARLQRCQVSREPSYAAFSTRGAFHLPLGVAPFVYRKIYEAAKFRFGRRRRAVLPLPATMQVKEAPDEAEVVFTAHCKATVSFQVSGDSWREQKERRAAMMVGILIGVFVLCWIPFFLTELISPLCACSLPPIWKSIFLWLGYSNSFFNPLIYTAFNKNYNNAFKSLFTKQR

SEQ ID NO: 479 - DNA, 1127 bp, Homo sapiens
  CDS (1)..(1116)
atggaggccgctagcctttcagtggccaccgccggcgttgcccttgccctgggacccgagaccagcagcgggaccccaagcccgagagggatactcggttcgaccccgagcggcgccgtcctgccgggccgagggccgcccttctctgtcttcacggtcctggtggtgacgctgctagtgctgctgatcgccgccactttcctgtggaacctgctggttccggtcaccatcccgcgggtccgtgccttccaccgcgtgccgcataacttggtggcctcgacggccgtctcggacgaactagtggcagcgctggcgatgccaccgagcctggcgagtgagctgtcgaccgggcgacgtcggctgctgggccggagcctgtgccacgtgtggatctccttccacggcccacggctgtgctgccccgccggcctcgggaacgtggcggccatcgccctgggccgcgacggggccatcacacggcacctgcagcacacgctgcgcacccgcagccgcgcctcgttgctcatgatcgcgctcacccgggtgccgtcggcgctcatcgccctcgcgccgctgctctttggccggggcgaggtgtgcgacgctcggctccagcgctgccaggtgagccgggaaccctcctatgccgccttctccacccgcggcgccttccacctgccgcttggcgtggtgccgtttgtctaccggaagatctacgaggcggccaagtttcgtttcggccgccgccggagagctgtgctgccgttgccggccaccatgcaggtgaaggaagcacctgatgaggctgaagtggtgttcacggcacattgcaaagcaacggtgtccttccaggtgagcggggactcctggcgggagcagaaggagaggcgagcagccatgatggtgggaattctgattggcgtgtttgtgctgtgctggatccccttcttcctgacggaactcatcagcccactctgtgcctgcagcctgccccccatctggaaaagcatatttctgtggcttggctactccaattctttcttcaaccccctgatttacacagcttttaacaagaactacaacaatgccttcaagagcctctttactaagcagagatgaacacaggg

SEQ ID NO: 480 - protein, 372 aa, Homo sapiens
MEAASLSVATAGVALALGPETSSGTPSPRGILGSTPSGAVLPGRGPPFSVFTVLVVTLLVLLIAATFLWNLLVPVTIPRVRAFHRVPHNLVASTAVSDELVAALAMPPSLASELSTGRRRLLGRSLCHVWISFHGPRLCCPAGLGNVAAIALGRDGAITRHLQHTLRTRSRASLLMIALTRVPSALIALAPLLFGRGEVCDARLQRCQVSREPSYAAFSTRGAFHLPLGVVPFVYRKIYEAAKFRFGRRRRAVLPLPATMQVKEAPDEAEVVFTAHCKATVSFQVSGDSWREQKERRAAMMVGILIGVFVLCWIPFFLTELISPLCACSLPPIWKSIFLWLGYSNSFFNPLIYTAFNKNYNNAFKSLFTKQR

SEQ ID NO: 481 - DNA, 1155 bp, Homo sapiens
  CDS (5)..(1144)
cgccatggaggccgctagcctttcagtggccaccgccggcgttgcccttgcccccgagaccagcagcccggcgttgcccttgccctgggacccgagaccagcagcaggacccgggaccccaagcccgagagggatactcggttcgaccccgagcggcgccgtcctgccgggccgagggccgcccttctctgtcttcacggtcctggtggtgacgctgctagtgctgctgatcgctgccactttcctgtggaacctgctggttccggtcaccatcccgcgggtccgtgccttccaccgcgtgccgcataacttggtggcctcgacggccgtctcggacgaactagtggcagcgctggcgatgccaccgagcctggcgagtgagctgtcgaccgggcgacgtcggctgctgggccgccacgtgtggatctccttcgacgccctgtgctgccccgccggcctcgggaacgtggcggccatcgccctgggccgcgacggggccatcacacggcacctgcagcacacgctgcgcacccgcagccgcgcctcgttgctcatgatcgcgctcgcccgggtgccgtcggcgctcatcgccctcgcgccgctgctctttggccggggcgaggtgtgcgacgctcggctccagcgctgccaggtgagccgggaaccctcctatgccgccttctccacccgcggcgccttccacctgccgcttggcgtggtgccgtttgtctaccggaagatctacgaggcggccaagtttcgtttcggccgccgccggagagctgtgctgccgttgccggccaccatgcaggtgaaggaagcacctgatgaggctgaagtggtgttcacggcacattgcaaagcaacggtgtccttccaggtgagcggggactcctggcgggagcagaaggagaggcgagcagccatgatggtgggaattctgattggcgtgtttgtgctgtgctggatccccttcttcctgacggaactcatcagcccactctgtgcctgcagcctgccccccatctggaaaagcatatttctgtggcttggctactccaattctttcttcaaccccctgatttacacagcttttaacaagaactacaacaatgccttcaagagcctctttactaagcagagatgaacacaggg

SEQ ID NO: 482 - protein, 380 aa, Homo sapiens
MEAASLSVATAGVALAPETSSPALPLPWDPRPAAGPGTPSPRGILGSTPSGAVLPGRGPPFSVFTVLVVTLLVLLIAATFLWNLLVPVTIPRVRAFHRVPHNLVASTAVSDELVAALAMPPSLASELSTGRRRLLGRHVWISFDALCCPAGLGNVAAIALGRDGAITRHLQHTLRTRSRASLLMIALARVPSALIALAPLLFGRGEVCDARLQRCQVSREPSYAAFSTRGAFHLPLGVVPFVYRKIYEAAKFRFGRRRRAVLPLPATMQVKEAPDEAEVVFTAHCKATVSFQVSGDSWREQKERRAAMMVGILIGVFVLCWIPFFLTELISPLCACSLPPIWKSIFLWLGYSNSFFNPLIYTAFNKNYNNAFKSLFTKQR

SEQ ID NO: 483 - DNA, 1152 bp, Homo sapiens
  CDS (5)..(1141)
cgccatggaggccgctagcctttcagtggccaccgccggcgttgcccttgccctgggacccgagaccagcagcggacccgggaccccaagcccgagagggatactcggttcgaccccgagcggcgccgtcctgccgggccgagggccgcccttctctgtcttcacggtcctggtggtgacgctgctagtgctgctgatcgctgccactttcctgtggaacctgctggttccggtcaccatcccgcgggtccgtgccttccaccgcgtgccgcataacttggtggcctcgacggccgtctcggacgaactagtggcagcgctggcgatgccaccgagcctggcgagtgagctgtcgaccgggcgacgtcggctgctgggccggagcctgtgccacgtgtggatctccttcgacgccggagcctgtctgtgctgccccgccggcctcgggaacgtggcggccatcgccctgggccgcgacggggccatcacacggcacctgcagcacacgctgcgcacccgcagccgcgcctcgttgctcatgatcgcgctcgcccgggtgccgtcggcgctcatcgccctcgcgccgctgctctttggccggggcgaggtgtgcgacgctcggctccagcgctgccaggtgagccgggaaccctcctatgccgccttctccacccgcggcgccttccacctgccgcttggcgtggtgccgtttgtctaccggaagatctacgaggcggccaagtttcgtttcggccgccgccggagagctgtgctgccgttgccggccaccatgcaggtgaggtccaaggtaaaggaagcacctgatgaggctgaagtggtgttcacggcacattgcaaagcaacggtgtccttccaggtgagcggggactcctggcgggagcagaaggagaggcgagcagccatgatggtgggaattctgattggcgtgtttgtgctgtgctggatccccttcttcctgacggaactcatcagcccactctgtgcctgcagcctgccccccatctggaaaagcatatttctgtggcttggctactccaattctttcttcaaccccctgatttacacagcttttaacaagaactacaacaatgccttcaagagcctctttactaagcagagatgaacacaggg

SEQ ID NO: 484 - protein, 379 aa, Homo sapiens
MEAASLSVATAGVALALGPETSSGPGTPSPRGILGSTPSGAVLPGRGPPFSVFTVLVVTLLVLLIAATFLWNLLVPVTIPRVRAFHRVPHNLVASTAVSDELVAALAMPPSLASELSTGRRRLLGRSLCHVWISFDAGACLCCPAGLGNVAAIALGRDGAITRHLQHTLRTRSRASLLMIALARVPSALIALAPLLFGRGEVCDARLQRCQVSREPSYAAFSTRGAFHLPLGVVPFVYRKIYEAAKFRFGRRRRAVLPLPATMQVRSKVKEAPDEAEVVFTAHCKATVSFQVSGDSWREQKERRAAMMVGILIGVFVLCWIPFFLTELISPLCACSLPPIWKSIFLWLGYSNSFFNPLIYTAFNKNYNNAFKSLFTKQR

SEQ ID NO: 485 - DNA, 8657 bp, Homo sapiens
  CDS (151)..(8325)
tttggcctcgggccagaattcggcacgaggggtctggagcttggaggagaagtctgaactaaggataaactaaagagaggccaatgagacttgaaccctgagcctaagttgtcaccagcaggactgatgtgcacacagaaggaatgaagtatggatgtgaaagaacgcaggccttactgctccctgaccaagagcagacgagagaaggaacggcgctacacaaattcctccgcagacaatgaggagtgccgggtacccacacagaagtcctacagttccagcgagacattgaaagcttttgatcatgattcctcgcggctgctttacggcaacagagtgaaggatttggttcacagagaagcagacgagttcactagacaaggacagaattttaccctaaggcagttaggagtttgtgaaccagcaactcgaagaggactggcattttgtgcggaaatggggctccctcacagaggttactctatcagtgcagggtcagatgctgatactgaaaatgaagcagtgatgtccccagagcatgccatgagactttggggcaggggggtcaaatcaggccgcagctcctgcctgtcaagtcggtccaactcagccctcaccctgacagatacggagcacgaaaacaagtccgacagtgagaatgagcaacctgcaagcaatcaaggccagtctaccctgcagcccttgccgccttcccataagcagcactctgcacagcatcatccatccatcacttctctcaacagaaactccctgaccaatagaaggaaccagagtccggccccgccggctgctttgcccgccgagctgcaaaccacacccgagtccgtccagctgcaggacagctgggtccttggcagtaatgtaccactggaaagcaggcatttcctattcaaaacaggaacaggtacaacgccactgttcagtactgcaaccccaggatacacaatggcatctggctctgtttattcaccacctactcggccactacctagaaacaccctatcaagaagtgcttttaaattcaagaagtcttcaaagtactgtagctggaaatgcactgcactgtgtgccgtaggggtctcggtgctcctggcaatactcctgtcttattttatagcaatgcatctctttggcctcaactggcagctacagcagactgaaaatgacacatttgagaatggaaaagtgaattctgataccatgccaacaaacactgtgtcattaccttctggagacaatggaaaattaggtggatttacgcaagaaaataacaccatagattccggagaacttgatattggccgaagagcaattcaagagattcctcccgggatcttctggagatcacagctcttcattgatcagccacagtttcttaaattcaatatctctcttcagaaggatgcattgattggagtatatggccggaagaagttaccgccttcccatactcagtcctccccccagtatgacttcgtggagctcctggatggcagcaggctgattgccagagagcagcggagcctgcttgagacggagagagccgggcggcaggcgagatccgtcagccttcatgaggccggctttatccagtacttggattctggaatctggcatctggctttttataatgatgggaaaaatgcagagcaggtgtcttttaataccattgttatagagtctgtggtggaatgtccccgaaattgccatggaaatggagaatgcgtttctggaacttgccattgttttccaggatttctgggtccggattgttcaagagccgcctgtccagtgttatgtagtggcaacgggcagtactccaagggccgctgcctgtgtttcagcggctggaagggcaccgagtgtgatgtgccgactacccagtgtattgacccacagtgtgggggtcgtgggatttgtatcatgggctcctgtgcttgcagctcaggatacaaaggagaaagttgtgaagaagctgactgtatagaccctgggtgttctaatcatggtgtgtgtatccacggggaatgtcactgcagtccaggatggggaggtagcaattgtgaaatactgaagaccatgtgtccagaccagtgctccggccacggaacgtatcttcaagaaagtggctcctgcacgtgtgaccctaactggactggcccagactgctcaaacgaaatatgttctgtggactgtggctcacacggcgtttgcatgggggggacgtgtcgctgtgaagaaggctggacgggcccagcctgtaatcagagagcctgccacccccgctgtgccgagcacgggacctgcaaggatggcaagtgtgaatgcagccagggctggaatggagagcactgcactatcgctcactatttggataagatagttaaagacaagataggatataaagagggttgtcctggtctgtgcaacagcaatggaagatgtaccctggaccaaaatggcggacattgtgtgtgccagcctggatggagaggagcaggctgtgacgtagccatggagactctttgcacagatagcaaggacaatgaaggggatggactcattgactgcatggatcccgattgctgcctacagagttcctgccagaatcagccctattgtcggggactgccggatcctcaggacatcattagccaaagccttcaatcgccttctcagcaagctgccaaatccttttatgatcgaatcagtttccttataggatctgatagcacccatgttatacctggagaaagtcctttcaataagagccttgcatctgtcatcagaggccaagtactgactgctgatggaactccacttattggagtaaatgtctcgtttttccattacccagaatatggatatactattacccgccaggacggaatgtttgacttggtggcaaatggtggggcctctctaactttggtatttgaacgatccccattcctcactcagtatcatactgtgtggattccatggaatgtcttttatgtgatggataccctagtcatggagaaagaagagaatgacattcccagctgtgatctgagtggattcgtgaggccaaatcccatcattgtgtcatcacctttatccacctttttcagatcttctcctgaagacagtcccatcattcccgaaacacaggtactccacgaggaaactacaattccaggaacagatttgaaactctcctacttgagttccagagctgcagggtataagtcagttctcaagatcaccatgacccagtctattattccatttaatttaatgaaggttcatcttatggtagctgtagtaggaagactcttccaaaagtggtttcctgcctcaccaaacttggcctatactttcatatgggataaaacagatgcatataatcagaaagtctatggtctatctgaagctgttgtgtcagttggatatgagtatgagtcgtgtttggacctgactctgtgggaaaagaggactgccattctgcagggctatgaattggatgcgtccaacatgggtggctggacattagataaacatcacgtgctggatgtacagaacggtatactgtacaagggaaacggggaaaaccagttcatctcccagcagcctccagtcgtgagtagcatcatgggcaatgggcgaaggcgcagcatttcctgccccagttgcaatggtcaagctgatggtaacaagttactggccccagtggcgctagcttgtgggatcgatggcagtctgtacgtaggcgatttcaactacgtgcggcggatattcccttctggaaatgtaacaagtgtcttagaactaagaaataaagattttagacatagcagcaacccagctcatagatactaccttgcaacggatccagtcacgggagatctgtacgtttctgacacaaacacccgcagaatttatcgcccaaagtcacttacgggggcaaaagacttgactaaaaatgcagaagtcgtcgcagggacaggggagcaatgccttccgtttgacgaggcgagatgtggggatggagggaaggccgtggaagccacactcatgagtcccaaaggaatggcagttgataagaatggattaatctactttgttgatggaaccatgattaggaaagttgaccaaaatggaatcatatcaactcttctgggctctaacgatttgacttcagccagacctttaacttgtgacaccagcatgcacatcagccaggtacgtctggaatggcccactgacctagccattaaccctatggataactccatttatgtcctggataataatgtagttttacagatcactgaaaatcgtcaagttcgcattgctgctggacggcccatgcactgtcaggttcccggagtggaatatcctgtggggaagcacgcggtgcagacaacactggaatcagccactgccattgctgtgtcctacagtggggtcctgtacattactgaaactgatgagaagaaaattaaccggataaggcaggtcacaacagatggagaaatctccttagtggccggaataccttcagagtgtgactgcaaaaatgatgccaactgtgactgttaccagagtggagatggctacgccaaggatgccaaactcagtgccccatcctccctggctgcttctccagatggtacactgtatattgcagatctagggaatatccggatccgggctgtgtcaaagaataagcctttacttaactctatgaacttctatgaagttgcgtctccaactgatcaagaactctacatctttgacatcaatggtactcaccaatatactgtaagtttagtcactggtgattacctttacaattttagctacagcaatgacaatgatattactgctgtgacagacagcaatggcaacacccttagaattagacgggacccaaatcgcatgccagttcgagtggtgtctcctgataaccaagtgatatggttgacaataggaacaaatggatgtttgaaaggcatgactgctcaaggactggaattagttttgtttacttaccatggcaatagtggccttttagccactaaaagtgatgaaactggatggacaacgttttttgactatgacagtgaaggtcgtctgacaaatgttacgtttccaactggagtggtcacaaacctgcatggggacatggacaaggctatcacagtggacattgagtcatctagccgagaagaagatgtcagcatcacttcaaatctgtcctcgatcgattctttctacaccatggttcaagatcagttaagaaacagctaccagattggttatgacggctccctcagaattatctacgccagtggcctggactcacactaccaaacagagccgcacgttctggctggcaccgctaatccgacggttgccaaaagaaacatgactttgcctggcgagaacggtcaaaacttggtggaatggagattccgaaaagagcaagcccaagggaaagtcaatgtctttggccgcaagctcagggttaatggcagaaacctcctttcagttgactttgatcgaacaacaaagacagaaaagatctatgacgaccaccgtaaatttctactgaggatcgcctacgacacgtctgggcacccgactctctggctgccaagcagcaagctgatggccgtcaatgtcacctattcatccacaggtcaaattgccagcatccagcgaggcaccactagcgagaaagtagattatgacggacaggggaggatcgtgtctcgggtctttgctgatggtaaaacatggagttacacatatttagaaaagtccatggttcttctgcttcatagccagcggcagtacatcttcgaatacgatatgtgggaccgcctgtctgccatcaccatgcccagtgtggctcgccacaccatgcagaccatccgatccattggctactaccgcaacatatacaaccccccggaaagcaacgcctccatcatcacggactacaacgaggaagggctgcttctacaaacagctttcttgggtacaagtcggagggtcttattcaaatacagaaggcagactaggctctcagaaattttatatgatagcacaagagtcagttttacctatgatgaaacagcaggagtcctaaagacagtaaacctccagagtgatggttttatttgcaccattagatacaggcaaattggtcccctgattgacaggcagattttccgctttagtgaagatgggatggtaaatgcaagatttgactatagctatgacaacagctttcgagtgaccagcatgcagggtgtgatcaatgaaacgccactgcctattgatctgtatcagtttgatgacatttctggcaaagttgagcagtttggaaagtttggagttatatattatgatattaaccagatcatttctacagctgtaatgacctatacgaagcactttgatgctcatggccgtatcaaggagattcaatatgagatattcaggtcgctcatgtactggattacaattcagtatgataacatgggtcgggtaaccaagagagagattaaaatagggccctttgccaacaccaccaaatatgcttatgaatatgatgttgatggacagctccaaacagtttacctcaatgaaaagataatgtggcggtacaactacgatctgaatggaaacctccatttactgaacccaagtaacagtgcgcgtctgacaccccttcgctatgacctgcgagacagaatcactcgactgggtgatgttcaatatcggttggatgaagatggtttcctacgtcaaaggggcacggaaatctttgaatatagctccaaggggcttctaactcgagtttacagtaaaggcagtggctggacagtgatctaccgttatgacggcctgggaaggcgtgtttctagcaaaaccagtctaggacagcacctgcagtttttttatgctgacttaacttatcccactaggattactcatgtctacaaccattcgagttcagaaattacctccctgtattatgatctccaaggacatctttttgccatggaaatcagcagtggggatgaattctatattgcatcggataacacagggacaccactggctgtgttcagtagcaatgggcttatgctgaaacagattcagtacactgcatatggggaaatctattttgactctaatattgactttcaactggtaattggatttcatggtggcctgtatgacccactcaccaaattaatccactttggagaaagagattatgacattttggcaggacggtggacaacacctgacatagaaatctggaaaagaattgggaaggacccagctccttttaacttgtacatgtttaggaataacaaccctgcaagcaaaatccatgacgtgaaagattacatcacagatgttaacagctggctggtgacatttggtttccatctgcacaatgctattcctggattccctgttcccaaatttgatttaacagaaccttcttacgaacttgtgaagagtcagcagtgggatgatataccgcccatcttcggagtccagcagcaagtggcgcggcaggccaaggccttcctgtcgctggggaagatggccgaggtgcaggtgagccggcgccgggccggcggcgcgcagtcctggctgtggttcgccacggtcaagtcgctgatcggcaagggcgtcatgctggccgtcagccagggccgcgtgcagaccaacgtgctcaacatcgccaacgaggactgcatcaaggtggcggccgtgctcaacaacgccttctacctggagaacctgcacttcaccatcgagggcaaggacacgcactacttcatcaagaccaccacgcccgagagcgacctgggcacgctgcggttgaccagcggccgcaaggcgctggagaacggcatcaacgtgacggtgtcgcagtccaccacggtggtgaacggcaggacgcgcaggttcgcggacgtggagatgcagttcggcgcgctggcgctgcacgtgcgctacggcatgaccctggacgaggagaaggcgcgcatcctggagcaggcgcggcagcgcgcgctcgcccgggcctgggcgcgcgagcagcagcgcgtgcgcgacggcgaggagggcgcgcgcctctggacggagggcgagaagcggcagctgctgagcgccggcaaggtgcagggctacgacgggtactacgtactctcggtggagcagtaccccgagctggccgacagcgccaacaacatccagttcctgcggcagagcgagatcggcaggaggtaacgcccgggccgcgcccgccgagccgctcacgccctgcccacattgtcctgtggcacaacccgagtgggactctccaacgcccaagagccttcctcccgggggaatgagactgctgttacgacccacacccacaccgcgaaaacaaggaccgcttttttccgaatgaccttaaaggtgatcggctttaacgaatatgtttacatatgcatagcgctgcactcagtcggactgaacgtagccagaggaaaaaaaaatcatcaaggacaaaggcctcgacctgttgcgctgggccgtctgttccttctaggcactgtatttaactaacttta

SEQ ID NO: 486 - protein, 2725 aa, Homo sapiens
MDVKERRPYCSLTKSRREKERRYTNSSADNEECRVPTQKSYSSSETLKAFDHDSSRLLYGNRVKDLVHREADEFTRQGQNFTLRQLGVCEPATRRGLAFCAEMGLPHRGYSISAGSDADTENEAVMSPEHAMRLWGRGVKSGRSSCLSSRSNSALTLTDTEHENKSDSENEQPASNQGQSTLQPLPPSHKQHSAQHHPSITSLNRNSLTNRRNQSPAPPAALPAELQTTPESVQLQDSWVLGSNVPLESRHFLFKTGTGTTPLFSTATPGYTMASGSVYSPPTRPLPRNTLSRSAFKFKKSSKYCSWKCTALCAVGVSVLLAILLSYFIAMHLFGLNWQLQQTENDTFENGKVNSDTMPTNTVSLPSGDNGKLGGFTQENNTIDSGELDIGRRAIQEIPPGIFWRSQLFIDQPQFLKFNISLQKDALIGVYGRKKLPPSHTQSSPQYDFVELLDGSRLIAREQRSLLETERAGRQARSVSLHEAGFIQYLDSGIWHLAFYNDGKNAEQVSFNTIVIESVVECPRNCHGNGECVSGTCHCFPGFLGPDCSRAACPVLCSGNGQYSKGRCLCFSGWKGTECDVPTTQCIDPQCGGRGICIMGSCACSSGYKGESCEEADCIDPGCSNHGVCIHGECHCSPGWGGSNCEILKTMCPDQCSGHGTYLQESGSCTCDPNWTGPDCSNEICSVDCGSHGVCMGGTCRCEEGWTGPACNQRACHPRCAEHGTCKDGKCECSQGWNGEHCTIAHYLDKIVKDKIGYKEGCPGLCNSNGRCTLDQNGGHCVCQPGWRGAGCDVAMETLCTDSKDNEGDGLIDCMDPDCCLQSSCQNQPYCRGLPDPQDIISQSLQSPSQQAAKSFYDRISFLIGSDSTHVIPGESPFNKSLASVIRGQVLTADGTPLIGVNVSFFHYPEYGYTITRQDGMFDLVANGGASLTLVFERSPFLTQYHTVWIPWNVFYVMDTLVMEKEENDIPSCDLSGFVRPNPIIVSSPLSTFFRSSPEDSPIIPETQVLHEETTIPGTDLKLSYLSSRAAGYKSVLKITMTQSIIPFNLMKVHLMVAVVGRLFQKWFPASPNLAYTFIWDKTDAYNQKVYGLSEAVVSVGYEYESCLDLTLWEKRTAILQGYELDASNMGGWTLDKHHVLDVQNGILYKGNGENQFISQQPPVVSSIMGNGRRRSISCPSCNGQADGNKLLAPVALACGIDGSLYVGDFNYVRRIFPSGNVTSVLELRNKDFRHSSNPAHRYYLATDPVTGDLYVSDTNTRRIYRPKSLTGAKDLTKNAEVVAGTGEQCLPFDEARCGDGGKAVEATLMSPKGMAVDKNGLIYFVDGTMIRKVDQNGIISTLLGSNDLTSARPLTCDTSMHISQVRLEWPTDLAINPMDNSIYVLDNNVVLQITENRQVRIAAGRPMHCQVPGVEYPVGKHAVQTTLESATAIAVSYSGVLYITETDEKKINRIRQVTTDGEISLVAGIPSECDCKNDANCDCYQSGDGYAKDAKLSAPSSLAASPDGTLYIADLGNIRIRAVSKNKPLLNSMNFYEVASPTDQELYIFDINGTHQYTVSLVTGDYLYNFSYSNDNDITAVTDSNGNTLRIRRDPNRMPVRVVSPDNQVIWLTIGTNGCLKGMTAQGLELVLFTYHGNSGLLATKSDETGWTTFFDYDSEGRLTNVTFPTGVVTNLHGDMDKAITVDIESSSREEDVSITSNLSSIDSFYTMVQDQLRNSYQIGYDGSLRIIYASGLDSHYQTEPHVLAGTANPTVAKRNMTLPGENGQNLVEWRFRKEQAQGKVNVFGRKLRVNGRNLLSVDFDRTTKTEKIYDDHRKFLLRIAYDTSGHPTLWLPSSKLMAVNVTYSSTGQIASIQRGTTSEKVDYDGQGRIVSRVFADGKTWSYTYLEKSMVLLLHSQRQYIFEYDMWDRLSAITMPSVARHTMQTIRSIGYYRNIYNPPESNASIITDYNEEGLLLQTAFLGTSRRVLFKYRRQTRLSEILYDSTRVSFTYDETAGVLKTVNLQSDGFICTIRYRQIGPLIDRQIFRFSEDGMVNARFDYSYDNSFRVTSMQGVINETPLPIDLYQFDDISGKVEQFGKFGVIYYDINQIISTAVMTYTKHFDAHGRIKEIQYEIFRSLMYWITIQYDNMGRVTKREIKIGPFANTTKYAYEYDVDGQLQTVYLNEKIMWRYNYDLNGNLHLLNPSNSARLTPLRYDLRDRITRLGDVQYRLDEDGFLRQRGTEIFEYSSKGLLTRVYSKGSGWTVIYRYDGLGRRVSSKTSLGQHLQFFYADLTYPTRITHVYNHSSSEITSLYYDLQGHLFAMEISSGDEFYIASDNTGTPLAVFSSNGLMLKQIQYTAYGEIYFDSNIDFQLVIGFHGGLYDPLTKLIHFGERDYDILAGRWTTPDIEIWKRIGKDPAPFNLYMFRNNNPASKIHDVKDYITDVNSWLVTFGFHLHNAIPGFPVPKFDLTEPSYELVKSQQWDDIPPIFGVQQQVARQAKAFLSLGKMAEVQVSRRRAGGAQSWLWFATVKSLIGKGVMLAVSQGRVQTNVLNIANEDCIKVAAVLNNAFYLENLHFTIEGKDTHYFIKTTTPESDLGTLRLTSGRKALENGINVTVSQSTTVVNGRTRRFADVEMQFGALALHVRYGMTLDEEKARILEQARQRALARAWAREQQRVRDGEEGARLWTEGEKRQLLSAGKVQGYDGYYVLSVEQYPELADSANNIQFLRQSEIGRR

SEQ ID NO: 487 - DNA, 783 bp, Homo sapiens
  CDS (7)..(777)
aagctttgtccccgaaattgccatggaaatggagaatgcgtttctggaacttgccattgttttccaggatttctgggtccggattgttcaagagccgcctgtccagtgttatgtagtggcaacgggcagtactccaagggccgctgcctgtgtttcagcggctggaagggcaccgagtgtgatgtgccgactacccagtgtattgacccacagtgtgggggtcgtgggatttgtatcatgggctcctgtgcttgcaactcaggatacaaaggagaaagttgtgaagaagctgactgtatagaccctgggtgttctaatcatggtgtgtgtatccacggggaatgtcactgcagtccaggatggggaggtagcaattgtgaaatactgaagaccatgtgtccagaccagtgctccggccacggaacgtatcttcaagaaagtggctcctgcacgtgtgaccctaactggactggcccagactgctcaaacgaaatatgttctgtggactgtggctcacacggcgtttgcatgggggggacgtgtcgctgtgaagaaggctggacgggcccagcctgtaatcagagagcctgccacccccgctgtgccgagcacgggacctgcaaggatggcaagtgtgaatgcagccagggctggaatggagagcactgcactatcgagggttgtcctggtctgtgcaacagcaatggaagatgtaccctggaccaaaatggctggcattgtgtgtgccagcctggatggagaggagcaggctgtgacgtcgac

SEQ ID NO: 488 - protein, 257 aa, Homo sapiens
CPRNCHGNGECVSGTCHCFPGFLGPDCSRAACPVLCSGNGQYSKGRCLCFSGWKGTECDVPTTQCIDPQCGGRGICIMGSCACNSGYKGESCEEADCIDPGCSNHGVCIHGECHCSPGWGGSNCEILKTMCPDQCSGHGTYLQESGSCTCDPNWTGPDCSNEICSVDCGSHGVCMGGTCRCEEGWTGPACNQRACHPRCAEHGTCKDGKCECSQGWNGEHCTIEGCPGLCNSNGRCTLDQNGWHCVCQPGWRGAGCD

SEQ ID NO: 489 - DNA, 2448 bp, Homo sapiens
  CDS (1)..(2448)
ggtaccaactggcagctacagcagactgaaaatgacacatttgagaatggaaaagtgaattctgataccatgccaacaaacactgtgtcattaccttctggagacaatggaaaattaggtggatttacgcaagaaaataacaccatagattccggagaacttgatattggccgaagagcaattcaagagattcctcccgggatcttctggagatcacagctcttcattgatcagccacagtttcttaaattcaatatctctcttcagaaggatgcattgattggagtatatggccggaaaggcttaccgccttcccatactcagtatgacttcgtggagctcctggatggcagcaggctgattgccagagagcagcggagcctgcttgagacggagagagccgggcggcaggcgagatccgtcagccttcatgaggccggctttatccagtacttggattctggaatctggcatctggctttttataatgatgggaaaaatgcagagcaggtgtcttttaataccattgttatagagtctgtggtggaatgtccccgaaattgccatggaaatggagaatgcgtttctggaacttgccattgttttccaggatttctgggtccggattgttcaagagccgcctgtccagtgttatgtagtggcaacgggcagtactccaagggccgctgcctgtgtttcagcggctggaagggcaccgagtgtgatgtgccgactacccagtgtattgacccacagtgtgggggtcgtgggatttgtatcatgggctcttgtgcttgcaactcaggatacaaaggagaaagttgtgaagaagctgactgtatagaccctgggtgttctaatcatggtgtgtgtatccacggggaatgtcactgcagtccaggatggggaggtagcaattgtgaaatactgaagaccatgtgtccagaccagtgctccggccacggaacgtatcttcaagaaagtggctcctgcacgtgtgaccctaactggactggcccagactgctcaaacgaaatatgttctgtggactgtggctcacacggcgtttgcatgggggggacgtgtcgctgtgaagaaggctggacgggcccagcctgtaatcagagagcctgccacccccgctgtgccgagcacgggacctgcaaggatggcaagtgtgaatgcagccagggctggaatggagagcactgcactatcgagggttgtcctggtctgtccaacagcaatggaagatgtaccctggaccaaaatggctggcattgtgtgtgccagcctggatggagaggagcaggctgtgacgtagccatggagactctttgcacagatagcaaggacaatgaaggagatggactcattgactgcatggatcccgattgctgcctacagagttcctgccagaatcagccctattgtcggggactgccggatcctcaggacatcattagccaaagccttcaatcgccttctcagcaagctgccaaatccttttatgatcgaatcagtttccttataggatctgatagcacccatgttatacctggagaaagtcctttcaataagagccttgcatctgtcatcagaggccaagtactgactgctgatggaactccacttattggagtaaatgtctcgtttttccattacccagaatatggatatactattacccgccaggacggaatgtttgacttggtggcaaatggtggggcctctctaactttggtatttgaacgatccccattcctcactcagtatcatactgtgtggattccatggaatgtcttttatgtgatggataccctagtcatgaagaaagaagagaatgacattcccagctgtgatctgagtggattcgtgaggccaaatcccatcattgtgtcatcacctttatccacctttttcagatcttctcctgaagacagtcccatcattcccgaaacacaggtactccacgaggaaactacaattccaggaacagatttgaaactctcctacttgagttccagagctgcagggtataagtcagttctcaagatcaccatgacccagtctattattccatttaatttaatgaaggttcatcttatggtagctgtagtaggaagactcttccaaaagtggtttcctgcctcaccaaacttggcctatactttcatatgggataaaacagatgcatataatcagaaagtctatggtctatctgaagctgttgtgtcagttggatatgagtatgagtcgtgtttggacctgactctgtgggaaaagaggactgccattctgcagggctatgaattggatgcgtccaacatgggtggctggacattagataaacatcacgtgctggatgtacagaacggtatactgtacaagggaaacggggaaaaccagttcatctcccagcagcctccagtcgtgagtagcgtcgac

SEQ ID NO: 490 - protein, 816 aa, Homo sapiens
GTNWQLQQTENDTFENGKVNSDTMPTNTVSLPSGDNGKLGGFTQENNTIDSGELDIGRRAIQEIPPGIFWRSQLFIDQPQFLKFNISLQKDALIGVYGRKGLPPSHTQYDFVELLDGSRLIAREQRSLLETERAGRQARSVSLHEAGFIQYLDSGIWHLAFYNDGKNAEQVSFNTIVIESVVECPRNCHGNGECVSGTCHCFPGFLGPDCSRAACPVLCSGNGQYSKGRCLCFSGWKGTECDVPTTQCIDPQCGGRGICIMGSCACNSGYKGESCEEADCIDPGCSNHGVCIHGECHCSPGWGGSNCEILKTMCPDQCSGHGTYLQESGSCTCDPNWTGPDCSNEICSVDCGSHGVCMGGTCRCEEGWTGPACNQRACHPRCAEHGTCKDGKCECSQGWNGEHCTIEGCPGLSNSNGRCTLDQNGWHCVCQPGWRGAGCDVAMETLCTDSKDNEGDGLIDCMDPDCCLQSSCQNQPYCRGLPDPQDIISQSLQSPSQQAAKSFYDRISFLIGSDSTHVIPGESPFNKSLASVIRGQVLTADGTPLIGVNVSFFHYPEYGYTITRQDGMFDLVANGGASLTLVFERSPFLTQYHTVWIPWNVFYVMDTLVMKKEENDIPSCDLSGFVRPNPIIVSSPLSTFFRSSPEDSPIIPETQVLHEETTIPGTDLKLSYLSSRAAGYKSVLKITMTQSIIPFNLMKVHLMVAVVGRLFQKWFPASPNLAYTFIWDKTDAYNQKVYGLSEAVVSVGYEYESCLDLTLWEKRTAILQGYELDASNMGGWTLDKHHVLDVQNGILYKGNGENQFISQQPPVVSSVD

SEQ ID NO: 491 - DNA, 2519 bp, Homo sapiens
  CDS (1)..(2514)
ggtaccaactggcagctacagcagactgaaaatgacgcatttgagaatggaaaagtgaattctgataccatgccaacaaacactgtgtcattaccttctggagacaatggaaaattaggtggatttacgcaagaaaataacaccatagattccggagaacttgatattggccgaagagcaattcaagagattcctcccgggatcttctggagatcacagctcttcattgatcagccacagtttcttaaattcaatatctctcttcagaaggatgcattgattggagtatatggccggaaaggcttaccgccttcccatactcagtatgacttcgtggagctcctggatggcagcaggctgattgccagagagcagcggagcctgcttgagacggagagagccgggcggcaggcgagatccgtcagccttcatgaggccggctttatccagtacttggattctggaatctggcatctggctttttataatgatgggaaaaatgcagagcaggtgtcttttaataccattgttatagagtctgtggtggaatgtccccgaaattgccatggaaatggagaatgcgtttctggaacttgccattgttttccaggatttctgggtccggattgttcaagagccgcctgtccagtgttatgtagtggcaacgggcagtactccaagggccgctgcctgtgtttcagcggctggaagggcaccgagtgtgatgtgccgactacccagtgtattgacccacagtgtgggggtcgtgggatttgtatcatgggctcctgtgcttgcaactcaggatacaaaggagaaagttgtgaagaagctgactgtatagaccctgggtgttctaatcatggtgtgtgtatccacggggaatgtcactgcagtccaggatggggaggtagcaattgtgaaatactgaagaccatgtgtccagaccagtgctccggccacggaacgtatcttcaagaaagtggctcctgcacgtgtgaccctaactggactggcccagactgctcaaacgaaatatgttctgtggactgtggctcacacggcgtttgcatgggggggacgtgccgctgtgaagaaggctggacgggcccagcctgtaatcagagagcctgccacccccgctgtgccgagcacgggacctgcaaggatggcaagtgtgaatgcagccagggctggaatggagagcactgcactatcgctcactatttggataagatagttaaagacaagataggatataaagagggttgtcctggtctgtgcaacagcaatggaagatgtaccctggaccaaaatggctggcattgtgcgtgccagcctggatggagaggagcaggctgtgacgtagccatggagactctttgcacagatagcaaggacaatgaaggagatggactcattgactgcatggatcccgattgctgcctacagagttcctgccagaatcagccctattgtcggggactgccggatcctcagggcatcattagccaaagccttcaatcgccttctcagcaagctgccaaatccttttatgatcgaatcagtttccttataggatctgatagcacccatgttatacctggagaaagtcctttcaataagagccttgcatctgtcatcagaggccaagtactgactgctgatggaactccacttattggagtaaatgtctcgtttttccattacccagaatatggatatactattacccgccaggacggaatgtttgacttggtggcaaatggtggggcctctctaactttggtatttgaacgatccccattcctcactcagtatcatactgtgtggattccatggaatgtcttttatgtgatggataccctagtcatgaagaaagaagagaatgacattcccagctgtgatctgagtggattcgtgaggccaaatcccatcattgtgtcatcacctttatccacctttttcagatcttctcctgaagacagtcccatcattcccgaaacacaggtactccacgaggaaactacaattccaggaacagatttgaaactctcctacttgagttccagagctgcagggtataagtcagttctcaagatcaccatgacccagtctattattccatttaatttaatgaaggttcatcttatggtagctgtagtaggaagactcttccaaaagtggtttcctgcctcaccaaacttggcctatactttcatatgggataaaacagatgcatataatcagaaagtctatggtctatctgaagctgttgtgtcagttggatatgagtatgagtcgtgtttggacctgactctgtgggaaaagaggactgccattctgcagggctatgaattggatgcgtccaacatgggtggctggacattagataaacatcacgtgctggatgtacagaacggtatactgtacaagggaaacggggaaaaccagttcatctcccagcagcctccagtcgtgagtagcgtcgacccagcagcctccagtcgtgagtagcg

SEQ ID NO: 492 - protein, 838 aa, Homo sapiens
GTNWQLQQTENDAFENGKVNSDTMPTNTVSLPSGDNGKLGGFTQENNTIDSGELDIGRRAIQEIPPGIFWRSQLFIDQPQFLKFNISLQKDALIGVYGRKGLPPSHTQYDFVELLDGSRLIAREQRSLLETERAGRQARSVSLHEAGFIQYLDSGIWHLAFYNDGKNAEQVSFNTIVIESVVECPRNCHGNGECVSGTCHCFPGFLGPDCSRAACPVLCSGNGQYSKGRCLCFSGWKGTECDVPTTQCIDPQCGGRGICIMGSCACNSGYKGESCEEADCIDPGCSNHGVCIHGECHCSPGWGGSNCEILKTMCPDQCSGHGTYLQESGSCTCDPNWTGPDCSNEICSVDCGSHGVCMGGTCRCEEGWTGPACNQRACHPRCAEHGTCKDGKCECSQGWNGEHCTIAHYLDKIVKDKIGYKEGCPGLCNSNGRCTLDQNGWHCACQPGWRGAGCDVAMETLCTDSKDNEGDGLIDCMDPDCCLQSSCQNQPYCRGLPDPQGIISQSLQSPSQQAAKSFYDRISFLIGSDSTHVIPGESPFNKSLASVIRGQVLTADGTPLIGVNVSFFHYPEYGYTITRQDGMFDLVANGGASLTLVFERSPFLTQYHTVWIPWNVFYVMDTLVMKKEENDIPSCDLSGFVRPNPIIVSSPLSTFFRSSPEDSPIIPETQVLHEETTIPGTDLKLSYLSSRAAGYKSVLKITMTQSIIPFNLMKVHLMVAVVGRLFQKWFPASPNLAYTFIWDKTDAYNQKVYGLSEAVVSVGYEYESCLDLTLWEKRTAILQGYELDASNMGGWTLDKHHVLDVQNGILYKGNGENQFISQQPPVVSSVDPAASSRE

SEQ ID NO: 493 - DNA, 2536 bp, Homo sapiens
  CDS (1)..(2535)
ggtaccaactggcagctacagcagactgaaaatgacacatttgagaatggaaaagtgaattctgataccatgccaacaaacactgtgtcattaccttctggagacaatggaaaattaggtggatttacgcaagaaaataacaccatagattccggagaacttgatattggccgaagagcaattcaagagattcctcccgggatcttctggagatcacagctcttcattgatcagccacagtttcttaaattcaatatctctcttcagaaggatgcattgattggagtatatggccggaaaggcttaccgccttcccatactcagtatgacttcgtggagctcctggatggcagcaggctgattgccagagagcagcggagcctgcttgagacggagagagccgggcggcaggcgagatccgtcagccttcatgaggccggctttatccagtacttggattctggaatctggcatctggctttttataatgatgggaaaaatgcagagcaggtgtcttttaataccattgttatagagtctgtggtggaatgtccccgaaattgccatggaaatggagaatgcgtttctggaacttgccattgttttccaggatttctgggtccggattgttcaagagccgcctgtccagtgttatgtagtggcaacgggcagtactccaagggccgctgcctgtgtttcagcggctggaagggcaccgagtgtgatgtgccgactacccagtgtattgacccacagtgtgggggtcgtgggatttgtatcatgggctcttgtgcttgcaactcaggatacaaaggagaaagttgtgaagaagctgactgtatagaccctgggtgttctaatcatggtgtgtgtatccacggggaatgtcactgcagtccaggatggggaggtagcaattgtgaaatactgaagaccatgtgtccagaccagtgctccggccacggaacgtatcttcaagaaagtggctcctgcacgtgtgaccctaactggactggcccagactgctcaaacgaaatatgttctgtggactgtggctcacacggcgtttgcatgggggggacgtgtcgctgtgaagaaggctggacgggcccagcctgtaatcagagagcctgccacccccgctgtgccgagcacgggacctgcaaggatggcaagtgtgaatgcagccagggctggaatggagagcactgcactatcgctcactatttggataagatagttaaagagggttgtcctggtctgtgcaacagcaatggaagatgtaccctggaccaaaatggctggcattgtgtgtgccagcctggatggagaggagcaggctgtgacgtagccatggagactctttgcacagatagtaaggacaatgaaggagatggactcattgactgcatggatcccgattgctgcctacagagttcctgccagaatcagccctattgtcggggactgccggatcctcaggacatcattagccaaagccttcaatcgccttctcagcaagctgccaaatccttttatgatcgaatcagtttccttataggatctgatagcacccatgttatacctggagaaagtcctttcaataagagccttgcatctgtcatcagaggccaagtactgactgctgatggaactccacttattggagtaaatgtctcgtttttccattacccagaatatggatatactattacccgccaggacggaatgtttgacttggtggcaaatggtggggcctctctaactttggtatttgaacgatccccattcctcactcagtatcatactgtgtggattccatggaatgtcttttatgtgatggataccctagtcatgaagaaagaagagaatgacattcccagctgtgatctgagtggattcgtgaggccaaatcccatcattgtgtcatcacctttatccacctttttcagatcttctcctgaagacagtcccatcattcccgaaacacaggtactccacgaggaaactacaattccaggaacagatttgaaactctcctacttgagttccagagctgcagggtataagtcagttctcaagatcaccatgacccagtctattattccatttaatttaatgaaggttcatcttatggtagctgtagtaggaagactcttccaaaagtggtttcctgcctcaccaaacttggcctatactttcatatgggataaaacagatgcatataatcagaaagtctatggtctatctgaagctgttgtgtcagttggatatgagtatgagtcgtgtttggacctgactctgtgggaaaagaggactgccattctgcagggctatgaattggatgcgtccaacatgggtggctggacattagataaacatcacgtgctggatgtacagaacggtatactgtacaagggaaacggggaaaaccagttcatctcccagcagcctccagtcgtgagtagcgtcgacgctacacacgactggaggctgctggtcattttcagctctgcagtagctgccagttggtacc

SEQ ID NO: 494 - protein, 845 aa, Homo sapiens
GTNWQLQQTENDTFENGKVNSDTMPTNTVSLPSGDNGKLGGFTQENNTIDSGELDIGRRAIQEIPPGIFWRSQLFIDQPQFLKFNISLQKDALIGVYGRKGLPPSHTQYDFVELLDGSRLIAREQRSLLETERAGRQARSVSLHEAGFIQYLDSGIWHLAFYNDGKNAEQVSFNTIVIESVVECPRNCHGNGECVSGTCHCFPGFLGPDCSRAACPVLCSGNGQYSKGRCLCFSGWKGTECDVPTTQCIDPQCGGRGICIMGSCACNSGYKGESCEEADCIDPGCSNHGVCIHGECHCSPGWGGSNCEILKTMCPDQCSGHGTYLQESGSCTCDPNWTGPDCSNEICSVDCGSHGVCMGGTCRCEEGWTGPACNQRACHPRCAEHGTCKDGKCECSQGWNGEHCTIAHYLDKIVKEGCPGLCNSNGRCTLDQNGWHCVCQPGWRGAGCDVAMETLCTDSKDNEGDGLIDCMDPDCCLQSSCQNQPYCRGLPDPQDIISQSLQSPSQQAAKSFYDRISFLIGSDSTHVIPGESPFNKSLASVIRGQVLTADGTPLIGVNVSFFHYPEYGYTITRQDGMFDLVANGGASLTLVFERSPFLTQYHTVWIPWNVFYVMDTLVMKKEENDIPSCDLSGFVRPNPIIVSSPLSTFFRSSPEDSPIIPETQVLHEETTIPGTDLKLSYLSSRAAGYKSVLKITMTQSIIPFNLMKVHLMVAVVGRLFQKWFPASPNLAYTFIWDKTDAYNQKVYGLSEAVVSVGYEYESCLDLTLWEKRTAILQGYELDASNMGGWTLDKHHVLDVQNGILYKGNGENQFISQQPPVVSSVDATHDWRLLVIFSSAVAASWY

SEQ ID NO: 495 - DNA, 2500 bp, Homo sapiens
  CDS (2)..(2500)
caccaagcttaactggcagctacagcagactgaaaatgacgcatttgagaatggaaaagtgaattctgataccatgccaacaaacactgtgtcattaccttctggagacaatggaaaattaggtggatttacgcaagaaaataacaccatagattccggagaacttgatattggccgaagagcaattcaagagattcctcccgggatcttctggagatcacagctcttcattgatcagccacagtttcttaaattcaatatctctcttcagaaggatgcattgattggagtatatggccggaaaggcttaccgccttcccatactcagtatgacttcgtggagctcctggatggcagcaggctgattgccagagagcagcggagcctgcttgagacggagagagccgggcggcaggcgagatccgtcagccttcatgaggccggctttatccagtacttggattctggaatctggcatctggctttttataatgatgggaaaaatgcagagcaggtgtcttttaataccattgttatagagtctgtggtggaatgtccccgaaattgccatggaaatggagaatgcgtttctggaacttgccattgttttccaggatttctgggtccggattgttcaagagccgcctgtccagtgttatgtagtggcaacgggcagtactccaagggccgctgcctgtgtttcagcggctggaagggcaccgagtgtgatgtgccgactacccagtgtattgacccacagtgtgggggtcgtgggatttgtatcatgggctcctgtgcttgcaactcaggatacaaaggagaaagttgtgaagaagctgactgtatagaccctgggtgttctaatcatggtgtgtgtatccacggggaatgtcactgcagtccaggatggggaggtagcaattgtgaaatactgaagaccatgtgtccagaccagtgctccggccacggaacgtatcttcaagaaagtggctcctgcacgtgtgaccctaactggactggcccagactgctcaaacgaaatatgttctgtggactgtggctcacacggcgtttgcatgggggggacgtgccgctgtgaagaaggctggacgggcccagcctgtaatcagagagcctgccacccccgctgtgccgagcacgggacctgcaaggatggcaagtgtgaatgcagccagggctggaatggagagcactgcactatcgctcactatttggataagatagttaaagacaagataggatataaagagggttgtcctggtctgtgcaacagcaatggaagatgtaccctggaccaaaatggctggcattgtgcgtgccagcctggatggagaggagcaggctgtgacgtagccatggagactctttgcacagatagcaaggacaatgaaggagatggactcattgactgcatggatcccgattgctgcctacagagttcctgccagaatcagccctattgtcggggactgccggatcctcagggcatcattagccaaagccttcaatcgccttctcagcaagctgccaaatccttttatgatcgaatcagtttccttataggatctgatagcacccatgttatacctggagaaagtcctttcaataagagccttgcatctgtcatcagaggccaagtactgactgctgatggaactccacttattggagtaaatgtctcgtttttccattacccagaatatggatatactattacccgccaggacggaatgtttgacttggtggcaaatggtggggcctctctaactttggtatttgaacgatccccattcctcactcagtatcatactgtgtggattccatggaatgtcttttatgtgatggataccctagtcatgaagaaagaagagaatgacattcccagctgtgatctgagtggattcgtgaggccaaatcccatcattgtgtcatcacctttatccacctttttcagatcttctcctgaagacagtcccatcattcccgaaacacaggtactccacgaggaaactacaattccaggaacagatttgaaactctcctacttgagttccagagctgcagggtataagtcagttctcaagatcaccatgacccagtctattattccatttaatttaatgaaggttcatcttatggtagctgtagtaggaagactcttccaaaagtggtttcctgcctcaccaaacttggcctatactttcatatgggataaaacagatgcatataatcagaaagtctatggtctatctgaagctgttgtgtcagttggatatgagtatgagtcgtgtttggacctgactctgtgggaaaagaggactgccattctgcagggctatgaattggatgcgtccaacatgggtggctggacattagataaacatcacgtgctggatgtacagaacggtatactgtacaagggaaacggggaaaaccagttcatctcccagcagcctccagtcgtgagtagcctcgagggc

SEQ ID NO: 496 - protein, 833 aa, Homo sapiens
TKLNWQLQQTENDAFENGKVNSDTMPTNTVSLPSGDNGKLGGFTQENNTIDSGELDIGRRAIQEIPPGIFWRSQLFIDQPQFLKFNISLQKDALIGVYGRKGLPPSHTQYDFVELLDGSRLIAREQRSLLETERAGRQARSVSLHEAGFIQYLDSGIWHLAFYNDGKNAEQVSFNTIVIESVVECPRNCHGNGECVSGTCHCFPGFLGPDCSRAACPVLCSGNGQYSKGRCLCFSGWKGTECDVPTTQCIDPQCGGRGICIMGSCACNSGYKGESCEEADCIDPGCSNHGVCIHGECHCSPGWGGSNCEILKTMCPDQCSGHGTYLQESGSCTCDPNWTGPDCSNEICSVDCGSHGVCMGGTCRCEEGWTGPACNQRACHPRCAEHGTCKDGKCECSQGWNGEHCTIAHYLDKIVKDKIGYKEGCPGLCNSNGRCTLDQNGWHCACQPGWRGAGCDVAMETLCTDSKDNEGDGLIDCMDPDCCLQSSCQNQPYCRGLPDPQGIISQSLQSPSQQAAKSFYDRISFLIGSDSTHVIPGESPFNKSLASVIRGQVLTADGTPLIGVNVSFFHYPEYGYTITRQDGMFDLVANGGASLTLVFERSPFLTQYHTVWIPWNVFYVMDTLVMKKEENDIPSCDLSGFVRPNPIIVSSPLSTFFRSSPEDSPIIPETQVLHEETTIPGTDLKLSYLSSRAAGYKSVLKITMTQSIIPFNLMKVHLMVAVVGRLFQKWFPASPNLAYTFIWDKTDAYNQKVYGLSEAVVSVGYEYESCLDLTLWEKRTAILQGYELDASNMGGWTLDKHHVLDVQNGILYKGNGENQFISQQPPVVSSLEG

SEQ ID NO: 497 - DNA, 730 bp, Homo sapiens
  CDS (2)..(730)
cacctcgcgaacagaaccttcttacgaacttgtgaagagtcagcagtgggatgatataccgcccatcttcggagtccagcagcaagtggcgcggcaggccaaggccttcctgtcgctggggaagatggccgaggtgcaggtgagccggcgccgggccggcggcgcgcagtcctggctgtggttcgccacggtcaagtcgctgatcggcaagggcgtcatgctggccgtcagccagggccgcgtgcagaccaacgtgctcaacatcgccaacgaggactgcatcaaggtggcggccgtgctcaacaacgccttctacctggagaacctgcacttcaccatcgagggcaaggacacgcactacttcatcaagaccaccacgcccgagagcgacctgggcacgctgcggttgaccagcggccgcaaggcgctggagaacggcatcaacgtgacggtgtcgcagtccaccacggtggtgaacggcaggacgcgcaggttcgcggacgtggagatgcagttcggcgcgctggcgctgcacgtgcgctacggcatgaccctggacgaggagaaggcgcgcatcctggagcaggcgcagcagcgcgtgcgcgacggcaaggtgcagggctacgacgggtactacgtactctcggtggagcagtaccccgagctggccgacagcgccaacaacatccagttcctgcggcagagcgagatcggcaggagggtcgacggc

SEQ ID NO: 498 - protein, 243 aa, Homo sapiens
TSRTEPSYELVKSQQWDDIPPIFGVQQQVARQAKAFLSLGKMAEVQVSRRRAGGAQSWLWFATVKSLIGKGVMLAVSQGRVQTNVLNIANEDCIKVAAVLNNAFYLENLHFTIEGKDTHYFIKTTTPESDLGTLRLTSGRKALENGINVTVSQSTTVVNGRTRRFADVEMQFGALALHVRYGMTLDEEKARILEQAQQRVRDGKVQGYDGYYVLSVEQYPELADSANNIQFLRQSEIGRRVDG

SEQ ID NO: 499 - DNA, 1178 bp, Homo sapiens
  CDS (78)..(1178)
cacctcgcgaccaatgagacttgaaccctgagcctaagttgtcaccagcaggactgatgtgcacacagaaggaatgaagtatggatgtgaaagaacgcaggccttactgctccctgaccaagagcagacgagagaaggaacggcgctacacaaattcctccgcagacaatgaggagtgccgggtacccacacagaagtcctacagttccagcgagacattgaaagcttttgatcatgattcctcgcggctgctttacggcaacagagtgaaggatttggttcacagagaagcagacgagttcactagacaagagcaacctgcaagcaatcaaggccagtctaccctgcagcccttgccgccttcccataagcagcactctgcacagcatcatccatccatcacttctctcaacagaaactccctgaccaatagaaggaaccagagtccggccccgccggctgctttgcccgccgagctgcaaaccacacccgagtccgtccagctgcaggacagctgggtccttggcagtaatgtaccactggaaagcaggcatttcctattcaaaacaggaacaggtacaacgccactgttcagtactgcaaccccaggatacacaatggcatctggctctgtttattcaccacctactcggccactacctagaaacaccctatcaagaagtgcttttaaattcaagaagtcttcaaagtactgtagctggaaatgcactgcactgtgtgccgtaggggtctcggtgctcctggcaatactcctgtcttattttatagcaatgcatctctttggcctcaactggcagctacagcagactgaaaatgacacatttgagaatggaaaagtgaattctgataccatgccaacaaacactgtgtcattaccttctggagacaatggaaaattaggtggatttacgcaagaaaataacaccatagattccggagaacttgatattggccgaagagcaattcaagagattcctcccgggatcttctggagatcacagctcttcattgatcagccacagtttcttaaattcaatatctctcttcagaaggatgcattgattggagtatatggccggaaaggcttaccgccttcccatactcagtatgacttcgtggagctcctggatggcagcaggctgattgccctcgagggc

SEQ ID NO: 500 - protein, 367 aa, Homo sapiens
SMDVKERRPYCSLTKSRREKERRYTNSSADNEECRVPTQKSYSSSETLKAFDHDSSRLLYGNRVKDLVHREADEFTRQEQPASNQGQSTLQPLPPSHKQHSAQHHPSITSLNRNSLTNRRNQSPAPPAALPAELQTTPESVQLQDSWVLGSNVPLESRHFLFKTGTGTTPLFSTATPGYTMASGSVYSPPTRPLPRNTLSRSAFKFKKSSKYCSWKCTALCAVGVSVLLAILLSYFIAMHLFGLNWQLQQTENDTFENGKVNSDTMPTNTVSLPSGDNGKLGGFTQENNTIDSGELDIGRRAIQEIPPGIFWRSQLFIDQPQFLKFNISLQKDALIGVYGRKGLPPSHTQYDFVELLDGSRLIALEG

SEQ ID NO: 501 - DNA, 8473 bp, Homo sapiens
  CDS (258)..(8141)
ttgacagaaaaaggcagtaaacggggaatctctttttttgaataaagaagaagaagaaataaagtacctgtcatcttgacaagtggcggagcggaggagtcaaggattataaatgatcacagccaggtccagctcgccccgtgattgggctctcccgcgatctgcaccgggggaagcgcatgagaggccaatgagacttgaaccctgagcctaagttgtcaccagcaggactgatgtgcacacagaaggaatgaagtatggatgtgaaagaacgcaggccttactgctccctgaccaagagcagacgagagaaggaacggcgctacacaaattcctccgcagacaatgaggagtgccgggtacccacacagaagtcctacagttccagcgagacattgaaagcttttgatcatgattcctcgcggctgctttacggcaacagagtgaaggatttggttcacagagaagcagacgagttcactagacaagagcaacctgcaagcaatcaaggccagtctaccctgcagcccttgccgccttcccataagcagcactctgcacagcatcatccatccatcacttctctcaacagaaactccctgaccaatagaaggaaccagagtccggccccgccggctgctttgcccgccgagctgcaaaccacacccgagtccgtccagctgcaggacagctgggtccttggcagtaatgtaccactggaaagcaggcatttcctattcaaaacaggaacaggtacaacgccactgttcagtactgcaaccccaggatacacaatggcatctggctctgtttattcaccacctactcggccactacctagaaacaccctatcaagaagtgcttttaaattcaagaagtcttcaaagtactgtagctggaaatgcactgcactgtgtgccgtaggggtctcggtgctcctggcaatactcctgtcttattttatagcaatgcatctctttggcctcaactggcagctacagcagactgaaaatgacacatttgagaatggaaaagtgaattctgataccatgccaacaaacactgtgtcattaccttctggagacaatggaaaattaggtggatttacgcaagaaaataacaccatagattccggagaacttgatattggccgaagagcaattcaagagattcctcccgggatcttctggagatcacagctcttcattgatcagccacagtttcttaaattcaatatctctcttcagaaggatgcattgattggagtatatggccggaaaggcttaccgccttcccatactcagtatgacttcgtggagctcctggatggcagcaggctgattgccagagagcagcggagcctgcttgagacggagagagccgggcggcaggcgagatccgtcagccttcatgaggccggctttatccagtacttggattctggaatctggcatctggctttttataatgatgggaaaaatgcagagcaggtgtcttttaataccattgttatagagtctgtggtggaatgtccccgaaattgccatggaaatggagaatgcgtttctggaacttgccattgttttccaggatttctgggtccggattgttcaagagccgcctgtccagtgttatgtagtggcaacgggcagtactccaagggccgctgcctgtgtttcagcggctggaagggcaccgagtgtgatgtgccgactacccagtgtattgacccacagtgtgggggtcgtgggatttgtatcatgggctcttgtgcttgcaactcaggatacaaaggaaaaagttgtgaagaagctgactgtatagaccctgggtgttctaatcatggtgtgtgtatccacggggaatgtcactgcagtccaggatggggaggtagcaattgtgaaatactgaagaccatgtgtccagaccagtgctccggccacggaacgtatcttcaagaaagtggctcctgcacgtgtgaccctaactggactggcccagactgctcaaacgaaatatgttctgtggactgtggctcacacggcgtttgcatgggggggacgtgtcgctgtgaagaaggctggacgggcccagcctgtaatcagagagcctgccacccccgctgtgccgagcacgggacctgcaaggatggcaagtgtgaatgcagccagggctggaatggagagcactgcactatcgctcactatttggataagatagttaaagacaagataggatataaagagggttgtcctggtctgtgcaacagcaatggaagatgtaccctggaccaaaatggcggacattgtgtgtgccagcctggatggagaggagcaggctgtgacgtagccatggagactctttgcacagatagcaaggacaatgaaggggatggactcattgactgcatggatcccgattgctgcctacagagttcctgccagaatcagccctattgtcggggactgccggatcctcaggacatcattagccaaagccttcaatcgccttctcagcaagctgccaaatccttttatgatcgaatcagtttccttataggatctgatagcacccatgttatacctggagaaagtcctttcaataagagccttgcatctgtcatcagaggccaagtactgactgctgatggaactccacttattggagtaaatgtctcgtttttccattacccagaatatggatatactattacccgccaggacggaatgtttgacttggtggcaaatggtggggcctctctaactttggtatttgaacgatccccattcctcactcagtatcatactgtgtggattccatggaatgtcttttatgtgatggataccctagtcatggagaaagaagagaatgacattcccagctgtgatctgagtggattcgtgaggccaaatcccatcattgtgtcatcacctttatccacctttttcagatcttctcctgaagacagtcccatcattcccgaaacacaggtactccacgaggaaactacaattccaggaacagatttgaaactctcctacttgagttccagagctgcagggtataagtcagttctcaagatcaccatgacccagtctattattccatttaatttaatgaaggttcatcttatggtagctgtagtaggaagactcttccaaaagtggtttcctgcctcaccaaacttggcctatactttcatatgggataaaacagatgcatataatcagaaagtctatggtctatctgaagctgttgtgtcagttggatatgagtatgagtcgtgtttggacctgactctgtgggaaaagaggactgccattctgcagggctatgaattggatgcgtccaacatgggtggctggacattagataaacatcacgtgctggatgtacagaacggtatactgtacaagggaaacggggaaaaccagttcatctcccagcagcctccagtcgtgagtagcatcatgggcaatgggcgaaggcgcagcatttcctgccccagttgcaatggtcaagctgatggtaacaagttactggccccagtggcgctagcttgtgggatcgatggcagtctgtacgtaggcgatttcaactacgtgcggcggatattcccttctggaaatgtaacaagtgtcttagaactaagaaataaagattttagacatagcagcaacccagctcatagatactaccttgcaacggatccagtcacgggagatctgtacgtttctgacacaaacacccgcagaatttatcgcccaaagtcacttacgggggcaaaagacttgactaaaaatgcagaagtcgtcgcagggacaggggagcaatgccttccgtttgacgaggcgagatgtggggatggagggaaggccgtggaagccacactcatgagtcccaaaggaatggcagttgataagaatggattaatctactttgttgatggaaccatgattaggaaagttgaccaaaatggaatcatatcaactcttctgggctctaacgatttgacttcagccagacctttaacttgtgacaccagcatgcacatcagccaggtacgtctggaatggcccactgacctagccattaaccctatggataactccatttatgtcctggataataatgtagttttacagatcactgaaaatcgtcaagttcgcattgctgctggacggcccatgcactgtcaggttcccggagtggaatatcctgtggggaagcacgcggtgcagacaacactggaatcagccactgccattgctgtgtcctacagtggggtcctgtacattactgaaactgatgagaagaaaattaaccggataaggcaggtcacaacagatggagaaatctccttagtggccggaataccttcagagtgtgactgcaaaaatgatgccaactgtgactgttaccagagtggagatggctacgccaaggatgccaaactcagtgccccatcctccctggctgcttctccagatggtacactgtatattgcagatctagggaatatccggatccgggctgtgtcaaagaataagcctttacttaactctatgaacttctatgaagttgcgtctccaactgatcaagaactctacatctttgacatcaatggtactcaccaatatactgtaagtttagtcactggtgattacctttacaattttagctacagcaatgacaatgatattactgctgtgacagacagcaatggcaacacccttagaattagacgggacccaaatcgcatgccagttcgagtggtgtctcctgataaccaagtgatatggttgacaataggaacaaatggatgtttgaaaggcatgactgctcaaggactggaattagttttgtttacttaccatggcaatagtggccttttagccactaaaagtgatgaaactggatggacaacgttttttgactatgacagtgaaggtcgtctgacaaatgttacgtttccaactggagtggtcacaaacctgcatggggacatggacaaggctatcacagtggacattgagtcatctagccgagaagaagatgtcagcatcacttcaaatctgtcctcgatcgattctttctacaccatggttcaagatcagttaagaaacagctaccagattggttatgacggctccctcagaattatctacgccagtggcctggactcacactaccaaacagagccgcacgttctggctggcaccgctaatccgacggttgccaaaagaaacatgactttgcctggcgagaacggtcaaaacttggtggaatggagattccgaaaagagcaagcccaagggaaagtcaatgtctttggccgcaagctcagggttaatggcagaaacctcctttcagttgactttgatcgaacaacaaagacagaaaagatctatgacgaccaccgtaaatttctactgaggatcgcctacgacacgtctgggcacccgactctctggctgccaagcagcaagctgatggccgtcaatgtcacctattcatccacaggtcaaattgccagcatccagcgaggcaccactagcgagaaagtagattatgacggacaggggaggatcgtgtctcgggtctttgctgatggtaaaacatggagttacacatatttagaaaagtccatggttcttctgcttcatagccagcggcagtacatcttcgaatacgatatgtgggaccgcctgtctgccatcaccatgcccagtgtggctcgccacaccatgcagaccatccgatccattggctactaccgcaacatatacaaccccccggaaagcaacgcctccatcatcacggactacaacgaggaagggctgcttctacaaacagctttcttgggtacaagtcggagggtcttattcaaatacagaaggcagactaggctctcagaaattttatatgatagcacaagagtcagttttacctatgatgaaacagcaggagtcctaaagacagtaaacctccagagtgatggttttatttgcaccattagatacaggcaaattggtcccctgattgacaggcagattttccgctttagtgaagatgggatggtaaatgcaagatttgactatagctatgacaacagctttcgagtgaccagcatgcagggtgtgatcaatgaaacgccactgcctattgatctgtatcagtttgatgacatttctggcaaagttgagcagtttggaaagtttggagttatatattatgatattaaccagatcatttctacagctgtaatgacctatacgaagcactttgatgctcatggccgtatcaaggagattcaatatgagatattcaggtcgctcatgtactggattacaattcagtatgataacatgggtcgggtaaccaagagagagattaaaatagggccctttgccaacaccaccaaatatgcttatgaatatgatgttgatggacagctccaaacagtttacctcaatgaaaagataatgtggcggtacaactacgatctgaatggaaacctccatttactgaacccaagtaacagtgcgcgtctgacaccccttcgctatgacctgcgagacagaatcactcgactgggtgatgttcaatatcggttggatgaagatggtttcctacgtcaaaggggcacggaaatctttgaatatagctccaaggggcttctaactcgagtttacagtaaaggcagtggctggacagtgatctaccgttatgacggcctgggaaggcgtgtttctagcaaaaccagtctaggacagcacctgcagtttttttatgctgacttaacttatcccactaggattactcatgtctacaaccattcgagttcagaaattacctccctgtattatgatctccaaggacatctttttgccatggaaatcagcagtggggatgaattctatattgcatcggataacacagggacaccactggctgtgttcagtagcaatgggcttatgctgaaacagattcagtacactgcatatggggaaatctattttgactctaatattgactttcaactggtaattggatttcatggtggcctgtatgacccactcaccaaattaatccactttggagaaagagattatgacattttggcaggacggtggacaacacctgacatagaaatctggaaaagaattgggaaggacccagctccttttaacttgtacatgtttaggaataacaaccctgcaagcaaaatccatgacgtgaaagattacatcacagatgttaacagctggctggtgacatttggtttccatctgcacaatgctattcctggattccctgttcccaaatttgatttaacagaaccttcttacgaacttgtgaagagtcagcagtgggatgatataccgcccatcttcggagtccagcagcaagtggcgcggcaggccaaggccttcctgtcgctggggaagatggccgaggtgcaggtgagccggcgccgggccggcggcgcgcagtcctggctgtggttcgccacggtcaagtcgctgatcggcaagggcgtcatgctggccgtcagccagggccgcgtgcagaccaacgtgctcaacatcgccaacgaggactgcatcaaggtggcggccgtgctcaacaacgccttctacctggagaacctgcacttcaccatcgagggcaaggacacgcactacttcatcaagaccaccacgcccgagagcgacctgggcacgctgcggttgaccagcggccgcaaggcgctggagaacggcatcaacgtgacggtgtcgcagtccaccacggtggtgaacggcaggacgcgcaggttcgcggacgtggagatgcagttcggcgcgctggcgctgcacgtgcgctacggcatgaccctggacgaggagaaggcgcgcatcctggagcaggcgcggcagcgcgcgctcgcccgggcctgggcgcgcgagcagcagcgcgtgcgcgacggcgaggagggcgcgcgcctctggacggagggcgagaagcggcagctgctgagcgccggcaaggtgcagggctacgacgggtactacgtactctcggtggagcagtaccccgagctggccgacagcgccaacaacatccagttcctgcggcagagcgagatcggcaggaggtaacgcccgggccgcgcccgccgagccgctcacgccctgcccacattgtcctgtggcacaacccgagtgggactctccaacgcccaagagccttcctcccgggggaatgagactgctgttacgacccacacccacaccgcgaaaacaaggaccgcttttttccgaatgaccttaaaggtgatcggctttaacgaatatgtttacatatgcatagcgctgcactcagtcggactgaacgtagccagaggaaaaaaaaatcatcaaggacaaaggcctcgacctgttgcgctgggccgtctgttccttctaggcactgtatttaactaacttta

SEQ ID NO: 502 - protein, 2628 aa, Homo sapiens
MDVKERRPYCSLTKSRREKERRYTNSSADNEECRVPTQKSYSSSETLKAFDHDSSRLLYGNRVKDLVHREADEFTRQEQPASNQGQSTLQPLPPSHKQHSAQHHPSITSLNRNSLTNRRNQSPAPPAALPAELQTTPESVQLQDSWVLGSNVPLESRHFLFKTGTGTTPLFSTATPGYTMASGSVYSPPTRPLPRNTLSRSAFKFKKSSKYCSWKCTALCAVGVSVLLAILLSYFIAMHLFGLNWQLQQTENDTFENGKVNSDTMPTNTVSLPSGDNGKLGGFTQENNTIDSGELDIGRRAIQEIPPGIFWRSQLFIDQPQFLKFNISLQKDALIGVYGRKGLPPSHTQYDFVELLDGSRLIAREQRSLLETERAGRQARSVSLHEAGFIQYLDSGIWHLAFYNDGKNAEQVSFNTIVIESVVECPRNCHGNGECVSGTCHCFPGFLGPDCSRAACPVLCSGNGQYSKGRCLCFSGWKGTECDVPTTQCIDPQCGGRGICIMGSCACNSGYKGKSCEEADCIDPGCSNHGVCIHGECHCSPGWGGSNCEILKTMCPDQCSGHGTYLQESGSCTCDPNWTGPDCSNEICSVDCGSHGVCMGGTCRCEEGWTGPACNQRACHPRCAEHGTCKDGKCECSQGWNGEHCTIAHYLDKIVKDKIGYKEGCPGLCNSNGRCTLDQNGGHCVCQPGWRGAGCDVAMETLCTDSKDNEGDGLIDCMDPDCCLQSSCQNQPYCRGLPDPQDIISQSLQSPSQQAAKSFYDRISFLIGSDSTHVIPGESPFNKSLASVIRGQVLTADGTPLIGVNVSFFHYPEYGYTITRQDGMFDLVANGGASLTLVFERSPFLTQYHTVWIPWNVFYVMDTLVMEKEENDIPSCDLSGFVRPNPIIVSSPLSTFFRSSPEDSPIIPETQVLHEETTIPGTDLKLSYLSSRAAGYKSVLKITMTQSIIPFNLMKVHLMVAVVGRLFQKWFPASPNLAYTFIWDKTDAYNQKVYGLSEAVVSVGYEYESCLDLTLWEKRTAILQGYELDASNMGGWTLDKHHVLDVQNGILYKGNGENQFISQQPPVVSSIMGNGRRRSISCPSCNGQADGNKLLAPVALACGIDGSLYVGDFNYVRRIFPSGNVTSVLELRNKDFRHSSNPAHRYYLATDPVTGDLYVSDTNTRRIYRPKSLTGAKDLTKNAEVVAGTGEQCLPFDEARCGDGGKAVEATLMSPKGMAVDKNGLIYFVDGTMIRKVDQNGIISTLLGSNDLTSARPLTCDTSMHISQVRLEWPTDLAINPMDNSIYVLDNNVVLQITENRQVRIAAGRPMHCQVPGVEYPVGKHAVQTTLESATAIAVSYSGVLYITETDEKKINRIRQVTTDGEISLVAGIPSECDCKNDANCDCYQSGDGYAKDAKLSAPSSLAASPDGTLYIADLGNIRIRAVSKNKPLLNSMNFYEVASPTDQELYIFDINGTHQYTVSLVTGDYLYNFSYSNDNDITAVTDSNGNTLRIRRDPNRMPVRVVSPDNQVIWLTIGTNGCLKGMTAQGLELVLFTYHGNSGLLATKSDETGWTTFFDYDSEGRLTNVTFPTGVVTNLHGDMDKAITVDIESSSREEDVSITSNLSSIDSFYTMVQDQLRNSYQIGYDGSLRIIYASGLDSHYQTEPHVLAGTANPTVAKRNMTLPGENGQNLVEWRFRKEQAQGKVNVFGRKLRVNGRNLLSVDFDRTTKTEKIYDDHRKFLLRIAYDTSGHPTLWLPSSKLMAVNVTYSSTGQIASIQRGTTSEKVDYDGQGRIVSRVFADGKTWSYTYLEKSMVLLLHSQRQYIFEYDMWDRLSAITMPSVARHTMQTIRSIGYYRNIYNPPESNASIITDYNEEGLLLQTAFLGTSRRVLFKYRRQTRLSEILYDSTRVSFTYDETAGVLKTVNLQSDGFICTIRYRQIGPLIDRQIFRFSEDGMVNARFDYSYDNSFRVTSMQGVINETPLPIDLYQFDDISGKVEQFGKFGVIYYDINQIISTAVMTYTKHFDAHGRIKEIQYEIFRSLMYWITIQYDNMGRVTKREIKIGPFANTTKYAYEYDVDGQLQTVYLNEKIMWRYNYDLNGNLHLLNPSNSARLTPLRYDLRDRITRLGDVQYRLDEDGFLRQRGTEIFEYSSKGLLTRVYSKGSGWTVIYRYDGLGRRVSSKTSLGQHLQFFYADLTYPTRITHVYNHSSSEITSLYYDLQGHLFAMEISSGDEFYIASDNTGTPLAVFSSNGLMLKQIQYTAYGEIYFDSNIDFQLVIGFHGGLYDPLTKLIHFGERDYDILAGRWTTPDIEIWKRIGKDPAPFNLYMFRNNNPASKIHDVKDYITDVNSWLVTFGFHLHNAIPGFPVPKFDLTEPSYELVKSQQWDDIPPIFGVQQQVARQAKAFLSLGKMAEVQVSRRRAGGAQSWLWFATVKSLIGKGVMLAVSQGRVQTNVLNIANEDCIKVAAVLNNAFYLENLHFTIEGKDTHYFIKTTTPESDLGTLRLTSGRKALENGINVTVSQSTTVVNGRTRRFADVEMQFGALALHVRYGMTLDEEKARILEQARQRALARAWAREQQRVRDGEEGARLWTEGEKRQLLSAGKVQGYDGYYVLSVEQYPELADSANNIQFLRQSEIGRR

SEQ ID NO: 503 - DNA, 1854 bp, Homo sapiens
  CDS (1)..(1854)
aagcttgaccaaaatggcggacattgtgtgtgccagcctggatggagaggagcaggctgtgacgtagccatggagactctttgcacagatagcaaggacaatgaaggagatggactcattgactgcatggatcccgattgctgcctacagagttcctgccagaatcagccctattgtcggggactgccggatcctcaggacatcattagccaaagccttcaatcgccttctcagcaagctgccaaatccttttatgatcgaatcagtttccttataggatctgatagcacccatgttatacctggagaaagtcctttcaataagagccttgcatctgtcatcagaggccaagtactgactgctgatggaactccacttattggagtaaatgtctcgtttttccattacccagaatatggatatactattacccgccaggacggaatgtttgacttggtggcaaatggtggggcctctctaactttggtatttgaacgatccccattcctcactcagtatcatactgtgtggattccatggaatgtcttttatgtgatggataccctagtcatgaagaaagaagagaatgacattcccagctgtgatctgagtggattcgtgaggccaaatcccatcattgtgtcatcacctttatccacctttttcagatcttctcctgaagacagtcccatcattcccgaaacacaggtactccacgaggaaactacaattccaggaacagatttgaaactctcctacttgagttccagagctgcagggtataagtcagttctcaagatcaccatgacccagtctattattccatttaatttaatgaaggttcatcttatggtagctgtagtaggaagactcttccaaaagtggtttcctgcctcaccaaacttggcctatactttcatatgggataaaacagatgcatataatcagaaagtctatggtctatctgaagctgttgtgtcagttggatatgagtatgagtcgtgtttggacctgactctgtgggaaaagaggactgccattctgcagggctatgaattggatgcgtccaacatgggtggctggacattagataaacatcacgtgctggatgtacagaacggtatactgtacaagggaaacggggaaaaccagttcatctcccagcagcctccagtcgtgagtagcatcatgggcaatgggcgaaggcgcagcatttcctgccccagttgcaatggtcaagctgatggtaacaagttactggccccagtggcgctagcttgtgggatcgatggcagtctgtacgtaggcgatttcaactatgtgcggcggatattcccttctggaaatgtaacaagtgtcttagaactaagaaataaagattttagacatagcagcaacccagctcatagatactaccttgcaacggatccagtcacgggagatctgtacgtttctgacacaaacacccgcagaatttatcgcccaaagtcacttacgggggcaaaagacttgactaaaaatgcagaagtcgtcgcagggacaggggagcaatgccttccgtttgacgaggcgagatgtggggatggagggaaggccgtggaagccacactcatgagtcccaaaggaatggcagttgataagaatggattaatctactttgttgatggaaccatgattaggaaagttgaccaaaatggaatcatatcaactcttctgggttctaacgatttgacttcagccagacctttaacttgtgacaccagcatgcacatcagccaggtacgtctggaatggcccactgacctagccattaaccctatggataactccatttatgtcctggataatgtcgac

SEQ ID NO: 504 - protein, 618 aa, Homo sapiens
KLDQNGGHCVCQPGWRGAGCDVAMETLCTDSKDNEGDGLIDCMDPDCCLQSSCQNQPYCRGLPDPQDIISQSLQSPSQQAAKSFYDRISFLIGSDSTHVIPGESPFNKSLASVIRGQVLTADGTPLIGVNVSFFHYPEYGYTITRQDGMFDLVANGGASLTLVFERSPFLTQYHTVWIPWNVFYVMDTLVMKKEENDIPSCDLSGFVRPNPIIVSSPLSTFFRSSPEDSPIIPETQVLHEETTIPGTDLKLSYLSSRAAGYKSVLKITMTQSIIPFNLMKVHLMVAVVGRLFQKWFPASPNLAYTFIWDKTDAYNQKVYGLSEAVVSVGYEYESCLDLTLWEKRTAILQGYELDASNMGGWTLDKHHVLDVQNGILYKGNGENQFISQQPPVVSSIMGNGRRRSISCPSCNGQADGNKLLAPVALACGIDGSLYVGDFNYVRRIFPSGNVTSVLELRNKDFRHSSNPAHRYYLATDPVTGDLYVSDTNTRRIYRPKSLTGAKDLTKNAEVVAGTGEQCLPFDEARCGDGGKAVEATLMSPKGMAVDKNGLIYFVDGTMIRKVDQNGIISTLLGSNDLTSARPLTCDTSMHISQVRLEWPTDLAINPMDNSIYVLDNVD

SEQ ID NO: 505 - DNA, 1854 bp, Homo sapiens
  CDS (1)..(1854)
aagcttgaccaaaatggcggacattgtgtgtgccagcctggatggagaggagcaggctgtgacgtagccatggagactctttgcacagatagcaaggacaatgaaggagatggactcattgactgcatggatcccgattgttgcctacagagttcctgccagaatcagccctattgtcggggactgccggatcctcaggacatcattagccaaagccttcaatcgccttctcagcaagctgccaaatccttttatgatcgaatcagtttccttataggatctgatagcacccatgttatacctggagaaagtcctttcaataagagccttgcatctgtcatcagaggccaagtactgactgctgatggaactccacttattggagtaaatgtctcgtttttccattacccagaatatggatatactattacccgccaggacggaatgtttgacttggtggcaagtggtggggcctctctaactttggtatttgaacgatccccattcctcactcagtatcatactgtgtggattccatggaatgtcttttatgtgatggataccctagtcatgaagaaagaagagaatgacattcccagctgtgatctgagtggattcgtgaggccaaatcccatcattgtgtcatcacctttatccacctttttcagatcttctcctgaagacagtcccatcattcccgaaacacaggtactccacgaggaaactacaattccaggaacagatttgaaactctcctacttgagttccagagctgcagggtataagtcagttctcaagatcaccatgacccagtctattattccatttaatttaatgaaggttcatcttatggtagctgtagtaggaagactcttccaaaagtggtttcctgcctcaccaaacttggcctatactttcatatgggataaaacagatgcatataatcagaaagtctatggtctatctgaagctgttgtgtcagttggatatgagtatgagtcgtgtttggacctgactctgtgggaaaagaggactgccattctgcagggctatgaattggatgcgtccaacatgggtggctggacattagataaacatcacgcgctggatgtacagaacggtatactgtacaagggaaacggggaaaaccagttcatctcccagcagcctccagtcgtgagtagcatcatgggcaatgggcgaaggcgcagcatttcctgccccagttgcaatggtcaagctgatggtaacaagttactggccccagtggcgctagcttgtgggatcgatggcagtctgtacgtaggcgatttcaactatgtgcggcggatattcccttctggaaatgtaacaagtgtcttagaactaagaaataaagattttagacatagcagcaacccagctcatagatactaccttgcaacggatccagtcacgggagatctgtacgtttctgacacaaacacccgcagaatttatcgcccaaagtcacttacgggggcaaaagactcgactaaaaatgcagaagtcgtcgcagggacaggggagcaatgccttccgtttgacgaggcgagatgtggggatggagggaaggccgtggaagccacactcatgagtcccaaaggaatggcagttgataagaatggattaatctactttgttgatggaaccatgattaggaaagttgaccaaaatggaatcatatcaactcttctgggttctaacgatttgacttcagccagacctttaacttgtgacaccagcatgcacatcagccaggtacgtctggaatggcccactgacctagccattaaccctatggataactccatttatgtcctggataatgtcgac

SEQ ID NO: 506 - protein, 618 aa, Homo sapiens
KLDQNGGHCVCQPGWRGAGCDVAMETLCTDSKDNEGDGLIDCMDPDCCLQSSCQNQPYCRGLPDPQDIISQSLQSPSQQAAKSFYDRISFLIGSDSTHVIPGESPFNKSLASVIRGQVLTADGTPLIGVNVSFFHYPEYGYTITRQDGMFDLVASGGASLTLVFERSPFLTQYHTVWIPWNVFYVMDTLVMKKEENDIPSCDLSGFVRPNPIIVSSPLSTFFRSSPEDSPIIPETQVLHEETTIPGTDLKLSYLSSRAAGYKSVLKITMTQSIIPFNLMKVHLMVAVVGRLFQKWFPASPNLAYTFIWDKTDAYNQKVYGLSEAVVSVGYEYESCLDLTLWEKRTAILQGYELDASNMGGWTLDKHHALDVQNGILYKGNGENQFISQQPPVVSSIMGNGRRRSISCPSCNGQADGNKLLAPVALACGIDGSLYVGDFNYVRRIFPSGNVTSVLELRNKDFRHSSNPAHRYYLATDPVTGDLYVSDTNTRRIYRPKSLTGAKDSTKNAEVVAGTGEQCLPFDEARCGDGGKAVEATLMSPKGMAVDKNGLIYFVDGTMIRKVDQNGIISTLLGSNDLTSARPLTCDTSMHISQVRLEWPTDLAINPMDNSIYVLDNVD

SEQ ID NO: 507 - DNA, 1834 bp, Homo sapiens
  CDS (2)..(1834)
taagcttgaccaaaatggcggacattgtgtgtgccagcctggatggagaggagcaggctgtgacgtagccatggagactctttgcacagatagcaaggacaatgaaggagatggactcattgactgcatggatcccgattgctgcctacagagttcctgccagaatcagccctattgtcggggactgccggatcctcaggacatcattagccaaagccttcaatcgccttctcagcaagctgccaaatccttttatgatcgaatcagtttccttataggatctgatagcacccatgttatacctggagaaagtcctttcaataagagccttgcatctgtcatcagaggccaagtactgactgctgatggaactccacttattggagtaaatgtctcgtttttccattacccagaatatggatatactattacccgccaggacggaatgtttgacttggtggcaaatggtggggcctctctaactttggtatttgaacgatccccattcctcactcagtatcatactgtgtggattccatggaatgtcttttatgtgatggataccctagtcatgaagaaagaagagaatgacattcccagctgtgatctgagtggattcgtgaggccaaatcccatcattgtgtcatcacctttatccacctttttcagatcttctcctgaagacagtcccatcattcccgaaacacaggtactccacgaggaaactacaattccaggaacagatttgaaactctcctacttgagttccagagctgcagggtataagtcagttctcaagatcaccatgacccagtctattattccatttaatttaatgaaggttcatcttatggtagctgtagtaggaagactcttccaaaagtggtttcctgcctcaccaaacttggcctatactttcatatgggataaaacagatgcatataatcagaaagtctatggtctatctgaagctgttgtgtcagttggatatgagtatgagtcgtgtttggacctgactctgtgggaaaagaggactgccattctgcagggctatgaattggatgcgtccaacatgggtggctggacattagataaacatcacgtgctggatgtacagaacggtatactgtacaagggaaacggggaaaaccagttcatctcccagcagcctccagtcgtgagtagcatcatgggcaatgggcgaaggcgcagcatttcctgccccagttgcaatggtcaagctgatggtaacaagttactggccccagtggcgctagcttgtgggatcgatggcagtctgtacgtaggcgatttcaactatgtgcggcggatattcccttctggaaatgtaacaagtgtcttagaactaagcagcaacccagctcatagatactaccttgcaacggatccagtcacgggagatctgtacgtttctgacacaaacacccgcagaatttatcgcccaaagtcacttacgggggcaaaagacttgactaaaaatgcagaagtcgtcgcagggacaggggagcaatgccttccgtttgacgaggcgagatgtggggatggagggaaggccgtggaagccacactcatgagtcccaaaggaatggcagttgataagaatggattaatctactttgttgatggaaccatgattaggaaagttgaccaaaatggaatcatatcaactcttctgggttctaacgatttgacttcagccagacctttaacttgtgacaccagcatgcacatcagccaggtacgtctggaatggcccactgacctagccattaaccctatggataactccatttatgtcctggataatgtcgac

SEQ ID NO: 508 - protein, 611 aa, Homo sapiens
KLDQNGGHCVCQPGWRGAGCDVAMETLCTDSKDNEGDGLIDCMDPDCCLQSSCQNQPYCRGLPDPQDIISQSLQSPSQQAAKSFYDRISFLIGSDSTHVIPGESPFNKSLASVIRGQVLTADGTPLIGVNVSFFHYPEYGYTITRQDGMFDLVANGGASLTLVFERSPFLTQYHTVWIPWNVFYVMDTLVMKKEENDIPSCDLSGFVRPNPIIVSSPLSTFFRSSPEDSPIIPETQVLHEETTIPGTDLKLSYLSSRAAGYKSVLKITMTQSIIPFNLMKVHLMVAVVGRLFQKWFPASPNLAYTFIWDKTDAYNQKVYGLSEAVVSVGYEYESCLDLTLWEKRTAILQGYELDASNMGGWTLDKHHVLDVQNGILYKGNGENQFISQQPPVVSSIMGNGRRRSISCPSCNGQADGNKLLAPVALACGIDGSLYVGDFNYVRRIFPSGNVTSVLELSSNPAHRYYLATDPVTGDLYVSDTNTRRIYRPKSLTGAKDLTKNAEVVAGTGEQCLPFDEARCGDGGKAVEATLMSPKGMAVDKNGLIYFVDGTMIRKVDQNGIISTLLGSNDLTSARPLTCDTSMHISQVRLEWPTDLAINPMDNSIYVLDNVD

SEQ ID NO: 509 - DNA, 1833 bp, Homo sapiens
  CDS (1)..(1833)
aagcttgaccaaaatggcggacattgtgtgtgccagcctggatggagaggagcaggctgtgacgtagccatggagactctttgcacagatagcaaggacaatgaaggagatggactcattgactgcatggatcccgattgctgcctacagagttcctgccagaatcagccctattgtcggggactgccggatcctcaggacatcattagccaaagccttcaatcgccttctcagcaagctgccaaatccttttatgatcgaatcagtttccttataggatctgatagcacccatgttatacctggagaaagtcctttcaataagagccttgcatctgtcatcagaggccaagtactgactgctgatggaactccacttattggagtaaatgtctcgtttttccattacccagaatatggatatactattacccgccaggacggaatgtttgacttggtggcaaatggtggggcctctctaactttggtatttgaacgatccccattcctcactcagtatcatactgtgtggattccatggaatgtcttttatgtgatggataccctagtcatgaagaaagaagagaatgacattcccagctgtgatctgagtggattcgtgaggccaaatcccatcattgtgtcatcacctttatccacctttttcagatcttctcctgaagacagtcccatcattcccgaaacacaggtactccacgaggaaactacaattccaggaacagatttgaaactctcctacttgagttccagagctgcagggtataagtcagttctcaagatcaccatgacccagtctattattccatttaatttaatgaaggttcatcttatggtagctgtagtaggaagactcttccaaaagtggtttcctgcctcaccaaacttggcctatactttcatatgggataaaacagatgcatataatcagaaagtctatggtctatctgaagctgttgtgtcagttggatatgagtatgagtcgtgtttggacctgactctgtgggaaaagaggactgccattctgcagggctatgaattggatgcgtccaacatgggtggctggacattagataaacatcacgtgctggatgtacagaacggtatactgtacaagggaaacggggaaaaccagttcatctcccagcagcctccagtcgtgagtagcatcatgggcaatgggcgaaggcgcagcatttcctgccccagttgcaatggtcaagctgatggtaacaagttactggccccagtggcgctagcttgtgggatcgatggcagtctgtacgtaggcgatttcaactatgtgcggcggatattcccttctggaaatgtaacaagtgtcttagaactaagcagcaacccagctcatagatactaccttgcaacggatccagtcacgggagatctgtacgtttctgacacaaacacccgcagaatttatcgcccaaagtcacttacgggggcaaaagacttgactaaaaatgcagaagtcgtcgcagggacaggggagcaatgccttccgtttgacgaggcgagatgtggggatggagggaaggccgtggaagccacactcatgagtcccaaaggaatggcagttgataagaatggattaatctactttgttgatggaaccatgattaggaaagttgaccaaaatggaatcatatcaactcttctgggttctaacgatttgacttcagccagacctttaacttgtgacaccagcatgcacatcagccaggtacgtctggaatggcccactgacctagccattaaccctatggataactccatttatgtcctggataatgtcgac

SEQ ID NO: 510 - protein, 611 aa, Homo sapiens; identical to SEQ ID NO: 508

SEQ ID NO: 511 - DNA, 1833 bp, Homo sapiens
  CDS (1)..(1833)
aagcttgaccaaaatggcggacattgtgtgtgccagcctggatggagaggagcaggctgtgacgtagccatggagactctttgcacagatagcaaggacaatgaaggagatggactcattgactgcatggatcccgattgctgcctacagagttcctgccagaatcagccctattgtcggggactgccggatcctcaggacatcattagccaaagccttcaatcgccttctcagcaagctgccaaatccttttatgatcgaatcagtttccttataggatctgatagcacccatgttatacctggagaaagtcctttcaataagagccttgcatctgtcatcagaggccaagtactgactgctgatggaactccacttattggagtaaatgtctcgtttttccattacccagaatatggatatactattacccgccaggacggaatgtttgacttggtggcaaatggtggggcctctctaactttggtatttgaacgatccccattcctcactcagtatcatactgtgtggattccatggaatgtcttttatgtgatggataccctagtcatgaagaaagaagagaatgacattcccagctgtgatctgagtggattcgtgaggccaaatcccatcattgtgtcatcacctttatccacctttttcagatcttctcctgaagacagtcccatcattcccgaaacacaggtactccacgaggaaactacaattccaggaacagatttgaaactctcctacttgagttccagagctgcagggtataagtcagttctcaagatcaccatgacccagtctattattccatttaatttaatgaaggttcatcttatggtagctgtagtaggaagactcttccaaaagtggtttcctgcctcaccaaacttggcctatactttcatatgggataaaacagatgcatataatcagaaagtctatggtctatctgaagctgttgtgtcagctggatatgagtatgagtcgtgtttggacctgactctgtgggaaaagaggactgccattctgcagggctatgaattggatgcgtccaacatgggtggctggacattagataaacatcacgtgctggatgtacggaacggtatactgtacaagggaaacggggaaaaccagttcatctcccagcagcctccagtcgtgagtagcatcatgggcaatgggcgaaggcgcagcatttcctgccccagttgcaatggtcaagctgatggtaacaagttactggccccagtggcgctagcttgtgggatcgatggcagtctgtacgtaggcgatttcaactatgtgcggcggatattcccttctggaaatgtaacaagtgtcttagaactaagcagcaacccagctcatagatactaccttgcaacggatccagtcacgggagatctgtacgtttctgacacaaacacccgcagaatttatcgcccaaagtcacttacgggggcaaaagacttgactaaaaatgcagaagtcgtcgcagggacaggggagcaatgccttccgtttgacgaggcgagatgtggggatggagggaaggccgtggaagccacactcatgagtcccaaaggaatggcagttgataagaatggattaatctactttgttgatggaaccatgattaggaaagttgaccaaaatggaatcatatcaactcttctgggttctaacgatttgacttcagccagacctttaacttgtgacaccagcatgcacatcagccaggtacgtctggaatggcccactgacctagccattaaccctatggataactccatttatgtcctggataatgtcgac

SEQ ID NO: 512 - protein, 611 aa, Homo sapiens
KLDQNGGHCVCQPGWRGAGCDVAMETLCTDSKDNEGDGLIDCMDPDCCLQSSCQNQPYCRGLPDPQDIISQSLQSPSQQAAKSFYDRISFLIGSDSTHVIPGESPFNKSLASVIRGQVLTADGTPLIGVNVSFFHYPEYGYTITRQDGMFDLVANGGASLTLVFERSPFLTQYHTVWIPWNVFYVMDTLVMKKEENDIPSCDLSGFVRPNPIIVSSPLSTFFRSSPEDSPIIPETQVLHEETTIPGTDLKLSYLSSRAAGYKSVLKITMTQSIIPFNLMKVHLMVAVVGRLFQKWFPASPNLAYTFIWDKTDAYNQKVYGLSEAVVSAGYEYESCLDLTLWEKRTAILQGYELDASNMGGWTLDKHHVLDVRNGILYKGNGENQFISQQPPVVSSIMGNGRRRSISCPSCNGQADGNKLLAPVALACGIDGSLYVGDFNYVRRIFPSGNVTSVLELSSNPAHRYYLATDPVTGDLYVSDTNTRRIYRPKSLTGAKDLTKNAEVVAGTGEQCLPFDEARCGDGGKAVEATLMSPKGMAVDKNGLIYFVDGTMIRKVDQNGIISTLLGSNDLTSARPLTCDTSMHISQVRLEWPTDLAINPMDNSIYVLDNVD

SEQ ID NO: 513 - DNA, 1833 bp, Homo sapiens
  CDS (1)..(1833)
aagcttgaccaaaatggcggacattgtgtgtgccagcctggatggagaggagcaggctgtgacgtagccatggagactctttgcacagatagcaaggacaatgaaggagatggactcattgactgcatggatcccgattgctgcctacagagttcctgccagaatcagccctattgtcggggactgccggatcctcaggacatcattagccaaagccttcaatcgccttctcagcaagctgccaaatccttttatgatcgaatcagtttccttataggatctgatagcacccatgttatacctggagaaagtcctttcaataagagccttgcatctgtcatcagaggccaagtactgactgctgatggaactccacttattggagtaaatgtctcgtttttccattacccagaatatggatatactattacccgccaggacggaatgtttgacttggtggcaaatggtggggcctctctaactttggtatttgaacgatccccattcctcactcagtatcatactgtgtggattccatggaatgtcttttatgtgatggataccctagtcatgaagaaagaagagaatgacattcccagctgtgatctgagtggattcgtgaggccaaatcccatcattgtgtcatcacctttatccacctttttcagatcttctcctgaagacagtcccatcattcccgaaacacaggtactccacgaggaaactacaattccaggaacagatttgaaactctcctacttgagttccagagctgcagggtataagtcagttctcaagatcaccatgacccagtctattattccatttaatttaatgaaggttcatcttatggtagctgtagtaggaagactcttccaaaagtggtttcctgcctcaccaaacttggcctatactttcatatgggataaaacagatgcatataatcagaaagtctatggtctatctgaagctgttgtgtcagttggatatgagtatgagtcgtgtttggacctgactctgtgggaaaagaggactgccattctgcagggctatgaattggatgcgtccaacatgggtggctggacattagataaacatcacgtgctggatgtacagaacggtatactgtacaagggaaacggggaaaaccagttcatctcccagcagcctccagtcgtgagtagcatcatgggcaatgggcgaaggcgcagcatttcctgccccagttgcaatggtcaagctgatggtaacaagttactggccccagtggcgctagcttgtgggatcgatggcagtctgtacgtaggcgatttcaactatgtgcggcggatattcccttctggaaatgtaacaagtgtcttagaactaagcagcaacccagctcatagatactaccttgcaacggatccagtcacgggagatctgtacgtttctgacacaaacacccgcagaatttatcgcccaaagtcacttacgggggcaaaagacttgactaaaaatgcagaagtcgtcgcagggacaggggagcaatgccttccgtttgacgaggcgagatgtggggatggagggaaggccgcggaagccacactcatgagtcccaaaggaatggcagttgataagaatggattaatctactttgttgatggaaccatgattaggaaagttgaccaaaatggaatcatatcaactcttctgggctctaacgatttgacttcagccagacctttaacttgtgacaccagcatgcacatcagccaggtacgtctggaatggcccactgacctagccattaaccctatggataactccatttatgtcctggataatgtcgac

SEQ ID NO: 514 - protein, 611 aa, Homo sapiens
KLDQNGGHCVCQPGWRGAGCDVAMETLCTDSKDNEGDGLIDCMDPDCCLQSSCQNQPYCRGLPDPQDIISQSLQSPSQQAAKSFYDRISFLIGSDSTHVIPGESPFNKSLASVIRGQVLTADGTPLIGVNVSFFHYPEYGYTITRQDGMFDLVANGGASLTLVFERSPFLTQYHTVWIPWNVFYVMDTLVMKKEENDIPSCDLSGFVRPNPIIVSSPLSTFFRSSPEDSPIIPETQVLHEETTIPGTDLKLSYLSSRAAGYKSVLKITMTQSIIPFNLMKVHLMVAVVGRLFQKWFPASPNLAYTFIWDKTDAYNQKVYGLSEAVVSVGYEYESCLDLTLWEKRTAILQGYELDASNMGGWTLDKHHVLDVQNGILYKGNGENQFISQQPPVVSSIMGNGRRRSISCPSCNGQADGNKLLAPVALACGIDGSLYVGDFNYVRRIFPSGNVTSVLELSSNPAHRYYLATDPVTGDLYVSDTNTRRIYRPKSLTGAKDLTKNAEVVAGTGEQCLPFDEARCGDGGKAAEATLMSPKGMAVDKNGLIYFVDGTMIRKVDQNGIISTLLGSNDLTSARPLTCDTSMHISQVRLEWPTDLAINPMDNSIYVLDNVD

SEQ ID NO: 515 - DNA, 1833 bp, Homo sapiens
  CDS (1)..(1833)
aagcttgaccaaaatggcggacattgtgtgtgccagcctggatggagaggagcaggctgtgacgtagccatggagactctttgcacagatagcaaggacaatgaaggagatggactcattgactgcatggatcccgattgctgcctacagagttcctgccagaatcagtcctattgtcggggactgccggatcctcaggacatcattagccaaagccttcaatcgccttctcagcaagctgccaaatccttttatgatcgaatcagtttccttataggatctgatagcacccatgttatacctggagaaagtcctttcaataagagccttgcatctgtcatcagaggccaagtactgactgctgatggaactccacttattggagtaaatgtctcgtttttccattacccagaatatggatatactattacccgccaggacggaatgtttgacttggtggcaaatggtggggcctctctaactttggtatttgaacgatccccattcctcactcagtatcatactgtgtggattccatggaatgtcttttatgtgatggataccctagtcatgaagaaagaagagaatgacattcccagctgtgatctgagtggattcgtgaggccaaatcccatcattgtgtcatcacctttatccacctttttcagatcttctcctgaagacagtcccatcattcccgaaacacaggtactccacgaggaaactacaattccaggaacagatttgaaactctcctacttgagttccagagctgcagggtataagtcagttctcaagatcaccatgacccagtctattattccatttaatttaatgaaggttcatcttatggtagctgtagtaggaagactcttccaaaagtggtttcctgcctcaccaaacttggcctatactttcatatgggataaaacagatgcatataatcagaaagtctatggtctatctgaagctgttgtgtcagttggatatgagtatgagtcgtgtttggacctgactctgtgggaaaagaggactgccattctgcagggctatgaattggatgcgtccaacatgggtggctggacattagataaacatcacgtgctggatgtacagaacggtatactgtacaagggaaacggggaaaaccagttcatctcccagcagcctccagtcgtgagtagcatcatgggcaatgggcgaaggcgcagcatttcctgccccagttgcaatggtcaagctgatggtaacaagttactggccccagtggcgctagcttgtgggatcgatggcagtctgcacgtaggcgatttcaactatgtgcggcggatattcccttctggaaatgtaacaagtgtcttagaactaagcagcaacccagctcatagatactaccttgcaacggatccagtcacgggagatctgtacgtttctgacacaaacacccgcagaatttatcgcccaaagtcacttacgggggcaaaagacttgactaaaaatgcagaagtcgtcgcagggacaggggagcaatgccttccgtttgacgaggcgagatgtggggatggagggaaggccgtggaagccacactcatgagtcccaaaggaatggcagttgataagaatggattaatctactttgttgatggaaccatgattaggaaagttgaccaaaatggaatcatatcaactcttctgggttctaacgatttgacttcagccagacctttaacttgtgacaccagcatgcacatcagccaggtacgtctggaatggcccactgacctagccattaaccctatggataactccatttatgtcctggataatgtcgac

SEQ ID NO: 516 - protein, 611 aa, Homo sapiens
KLDQNGGHCVCQPGWRGAGCDVAMETLCTDSKDNEGDGLIDCMDPDCCLQSSCQNQSYCRGLPDPQDIISQSLQSPSQQAAKSFYDRISFLIGSDSTHVIPGESPFNKSLASVIRGQVLTADGTPLIGVNVSFFHYPEYGYTITRQDGMFDLVANGGASLTLVFERSPFLTQYHTVWIPWNVFYVMDTLVMKKEENDIPSCDLSGFVRPNPIIVSSPLSTFFRSSPEDSPIIPETQVLHEETTIPGTDLKLSYLSSRAAGYKSVLKITMTQSIIPFNLMKVHLMVAVVGRLFQKWFPASPNLAYTFIWDKTDAYNQKVYGLSEAVVSVGYEYESCLDLTLWEKRTAILQGYELDASNMGGWTLDKHHVLDVQNGILYKGNGENQFISQQPPVVSSIMGNGRRRSISCPSCNGQADGNKLLAPVALACGIDGSLHVGDFNYVRRIFPSGNVTSVLELSSNPAHRYYLATDPVTGDLYVSDTNTRRIYRPKSLTGAKDLTKNAEVVAGTGEQCLPFDEARCGDGGKAVEATLMSPKGMAVDKNGLIYFVDGTMIRKVDQNGIISTLLGSNDLTSARPLTCDTSMHISQVRLEWPTDLAINPMDNSIYVLDNVD

SEQ ID NO: 517 - DNA, 2536 bp, Homo sapiens; identical to SEQ ID NO: 493
  CDS (7)..(2469)

SEQ ID NO: 518 - protein, 821 aa, Homo sapiens
NWQLQQTENDTFENGKVNSDTMPTNTVSLPSGDNGKLGGFTQENNTIDSGELDIGRRAIQEIPPGIFWRSQLFIDQPQFLKFNISLQKDALIGVYGRKGLPPSHTQYDFVELLDGSRLIAREQRSLLETERAGRQARSVSLHEAGFIQYLDSGIWHLAFYNDGKNAEQVSFNTIVIESVVECPRNCHGNGECVSGTCHCFPGFLGPDCSRAACPVLCSGNGQYSKGRCLCFSGWKGTECDVPTTQCIDPQCGGRGICIMGSCACNSGYKGESCEEADCIDPGCSNHGVCIHGECHCSPGWGGSNCEILKTMCPDQCSGHGTYLQESGSCTCDPNWTGPDCSNEICSVDCGSHGVCMGGTCRCEEGWTGPACNQRACHPRCAEHGTCKDGKCECSQGWNGEHCTIAHYLDKIVKEGCPGLCNSNGRCTLDQNGWHCVCQPGWRGAGCDVAMETLCTDSKDNEGDGLIDCMDPDCCLQSSCQNQPYCRGLPDPQDIISQSLQSPSQQAAKSFYDRISFLIGSDSTHVIPGESPFNKSLASVIRGQVLTADGTPLIGVNVSFFHYPEYGYTITRQDGMFDLVANGGASLTLVFERSPFLTQYHTVWIPWNVFYVMDTLVMKKEENDIPSCDLSGFVRPNPIIVSSPLSTFFRSSPEDSPIIPETQVLHEETTIPGTDLKLSYLSSRAAGYKSVLKITMTQSIIPFNLMKVHLMVAVVGRLFQKWFPASPNLAYTFIWDKTDAYNQKVYGLSEAVVSVGYEYESCLDLTLWEKRTAILQGYELDASNMGGWTLDKHHVLDVQNGILYKGNGENQFISQQPPVVSS

SEQ ID NO: 519 - DNA, 2482 bp, Homo sapiens
  CDS (2)..(2482)
cacctcgcgaaactggcagctacagcagactgaaaatgacacatttgagaatggaaaagtgaattctgataccatgccaacaaacactgtgtcattaccttctggagacaatggaaaattaggtggatttacgcaagaaaataacaccatagattccggagaacttgatattggccgaagagcaattcaagagattcctcccgggatcttctggagatcacagctcttcattgatcagccacagtttcttaaattcaatatctctcttcagaaggatgcattgattggagtatatggccggaaaggcttaccgccttcccatactcagtatgacttcgtggagctcctggatggcagcaggctgattgccagagagcagcggagcctgcttgagacggagagagccgggcggcaggcgagatccgtcagccttcatgaggccggctttatccagtacttggattctggaatctggcatctggctttttataatgatgggaaaaatgcagagcaggtgtcttttaataccattgttatagagtctgtggtggaatgtccccgaaattgccatggaaatggagaatgcgtttctggaacttgccattgttttccaggatttctgggtccggattgttcaagagccgcctgtccagtgttatgtagtggcaacgggcagtactccaagggccgctgcctgtgtttcagcggctggaagggcaccgagtgtgatgtgccgactacccagtgtattgacccacagtgtgggggtcgtgggatttgtatcatgggctcttgtgcttgcaactcaggatacaaaggagaaagttgtgaagaagctgactgtatagaccctgggtgttctaatcatggtgtgtgtatccacggggaatgtcactgcagtccaggatggggaggtagcaattgtgaaatactgaagaccatgtgtccagaccagtgctccggccacggaacgtatcttcaagaaagtggctcctgcacgtgtgaccctaactggactggcccagactgctcaaacgaaatatgttctgtggactgtggctcacacggcgtttgcatgggggggacgtgtcgctgtgaagaaggctggacgggcccagcctgtaatcagagagcctgccacccccgctgtgccgagcacgggacctgcaaggatggcaagtgtgaatgcagccagggctggaatggagagcactgcactatcgctcactatttggataagatagttaaagagggttgtcctggtctgtgcaacagcaatggaagatgtaccctggaccaaaatggctggcattgtgtgtgccagcctggatggagaggagcaggctgtgacgtagccatggagactctttgcacagatagtaaggacaatgaaggagatggactcattgactgcatggatcccgattgctgcctacagagttcctgccagaatcagccctattgtcggggactgccggatcctcaggacatcattagccaaagccttcaatcgccttctcagcaagctgccaaatccttttatgatcgaatcagtttccttataggatctgatagcacccatgttatacctggagaaagtcctttcaataagagccttgcatctgtcatcagaggccaagtactgactgctgatggaactccacttattggagtaaatgtctcgtttttccattacccagaatatggatatactattacccgccaggacggaatgtttgacttggtggcaaatggtggggcctctctaactttggtatttgaacgatccccattcctcactcagtatcatactgtgtggattccatggaatgtcttttatgtgatggataccctagtcatgaagaaagaagagaatgacattcccagctgtgatctgagtggattcgtgaggccaaatcccatcattgtgtcatcacctttatccacctttttcagatcttctcctgaagacagtcccatcattcccgaaacacaggtactccacgaggaaactacaattccaggaacagatttgaaactctcctacttgagttccagagctgcagggtataagtcagttctcaagatcaccatgacccagtctattattccatttaatttaatgaaggttcatcttatggtagctgtagtaggaagactcttccaaaagtggtttcctgcctcaccaaacttggcctatactttcatatgggataaaacagatgcatataatcagaaagtctatggtctatctgaagctgttgtgtcagttggatatgagtatgagtcgtgtttggacctgactctgtgggaaaagaggactgccattctgcagggctatgaattggatgcgtccaacatgggtggctggacattagataaacatcacgtgctggatgtacagaacggtatactgtacaagggaaacggggaaaaccagttcatctcccagcagcctccagtcgtgagtagcctcgagggc

SEQ ID NO: 520 - protein, 827 aa, Homo sapiens
TSRNWQLQQTENDTFENGKVNSDTMPTNTVSLPSGDNGKLGGFTQENNTIDSGELDIGRRAIQEIPPGIFWRSQLFIDQPQFLKFNISLQKDALIGVYGRKGLPPSHTQYDFVELLDGSRLIAREQRSLLETERAGRQARSVSLHEAGFIQYLDSGIWHLAFYNDGKNAEQVSFNTIVIESVVECPRNCHGNGECVSGTCHCFPGFLGPDCSRAACPVLCSGNGQYSKGRCLCFSGWKGTECDVPTTQCIDPQCGGRGICIMGSCACNSGYKGESCEEADCIDPGCSNHGVCIHGECHCSPGWGGSNCEILKTMCPDQCSGHGTYLQESGSCTCDPNWTGPDCSNEICSVDCGSHGVCMGGTCRCEEGWTGPACNQRACHPRCAEHGTCKDGKCECSQGWNGEHCTIAHYLDKIVKEGCPGLCNSNGRCTLDQNGWHCVCQPGWRGAGCDVAMETLCTDSKDNEGDGLIDCMDPDCCLQSSCQNQPYCRGLPDPQDIISQSLQSPSQQAAKSFYDRISFLIGSDSTHVIPGESPFNKSLASVIRGQVLTADGTPLIGVNVSFFHYPEYGYTITRQDGMFDLVANGGASLTLVFERSPFLTQYHTVWIPWNVFYVMDTLVMKKEENDIPSCDLSGFVRPNPIIVSSPLSTFFRSSPEDSPIIPETQVLHEETTIPGTDLKLSYLSSRAAGYKSVLKITMTQSIIPFNLMKVHLMVAVVGRLFQKWFPASPNLAYTFIWDKTDAYNQKVYGLSEAVVSVGYEYESCLDLTLWEKRTAILQGYELDASNMGGWTLDKHHVLDVQNGILYKGNGENQFISQQPPVVSSLEG

SEQ ID NO: 521 - DNA, 8645 bp, Homo sapiens
  CDS (151)..(8313)
tttggcctcgggccagaattcggcacgaggggtctggagcttggaggagaagtctgaactaaggataaactaaagagaggccaatgagacttgaaccctgagcctaagttgtcaccagcaggactgatgtgcacacagaaggaatgaagtatggatgtgaaagaacgcaggccttactgctccctgaccaagagcagacgagagaaggaacggcgctacacaaattcctccgcagacaatgaggagtgccgggtacccacacagaagtcctacagttccagcgagacattgaaagcttttgatcatgattcctcgcggctgctttacggcaacagagtgaaggatttggttcacagagaagcagacgagttcactagacaaggacagaattttaccctaaggcagttaggagtttgtgaaccagcaactcgaagaggactggcattttgtgcggaaatggggctccctcacagaggttactctatcagtgcagggtcagatgctgatactgaaaatgaagcagtgatgtccccagagcatgccatgagactttggggcaggggggtcaaatcaggccgcagctcctgcctgtcaagtcggtccaactcagccctcaccctgacagatacggagcacgaaaacaagtccgacagtgagaatgagcaacctgcaagcaatcaaggccagtctaccctgcagcccttgccgccttcccataagcagcactctgcacagcatcatccatccatcacttctctcaacagaaactccctgaccaatagaaggaaccagagtccggccccgccggctgctttgcccgccgagctgcaaaccacacccgagtccgtccagctgcaggacagctgggtccttggcagtaatgtaccactggaaagcaggcatttcctattcaaaacaggaacaggtacaacgccactgttcagtactgcaaccccaggatacacaatggcatctggctctgtttattcaccacctactcggccactacctagaaacaccctatcaagaagtgcttttaaattcaagaagtcttcaaagtactgtagctggaaatgcactgcactgtgtgccgtaggggtctcggtgctcctggcaatactcctgtcttattttatagcaatgcatctctttggcctcaactggcagctacagcagactgaaaatgacacatttgagaatggaaaagtgaattctgataccatgccaacaaacactgtgtcattaccttctggagacaatggaaaattaggtggatttacgcaagaaaataacaccatagattccggagaacttgatattggccgaagagcaattcaagagattcctcccgggatcttctggagatcacagctcttcattgatcagccacagtttcttaaattcaatatctctcttcagaaggatgcattgattggagtatatggccggaaaggcttaccgccttcccatactcagtatgacttcgtggagctcctggatggcagcaggctgattgccagagagcagcggagcctgcttgagacggagagagccgggcggcaggcgagatccgtcagccttcatgaggccggctttatccagtacttggattctggaatctggcatctggctttttataatgatgggaaaaatgcagagcaggtgtcttttaataccattgttatagagtctgtggtggaatgtccccgaaattgccatggaaatggagaatgcgtttctggaacttgccattgttttccaggatttctgggtccggattgttcaagagccgcctgtccagtgttatgtagtggcaacgggcagtactccaagggccgctgcctgtgtttcagcggctggaagggcaccgagtgtgatgtgccgactacccagtgtattgacccacagtgtgggggtcgtgggatttgtatcatgggctcctgtgcttgcagctcaggatacaaaggagaaagttgtgaagaagctgactgtatagaccctgggtgttctaatcatggtgtgtgtatccacggggaatgtcactgcagtccaggatggggaggtagcaattgtgaaatactgaagaccatgtgtccagaccagtgctccggccacggaacgtatcttcaagaaagtggctcctgcacgtgtgaccctaactggactggcccagactgctcaaacgaaatatgttctgtggactgtggctcacacggcgtttgcatgggggggacgtgtcgctgtgaagaaggctggacgggcccagcctgtaatcagagagcctgccacccccgctgtgccgagcacgggacctgcaaggatggcaagtgtgaatgcagccagggctggaatggagagcactgcactatcgctcactatttggataagatagttaaagacaagataggatataaagagggttgtcctggtctgtgcaacagcaatggaagatgtaccctggaccaaaatggcggacattgtgtgtgccagcctggatggagaggagcaggctgtgacgtagccatggagactctttgcacagatagcaaggacaatgaaggggatggactcattgactgcatggatcccgattgctgcctacagagttcctgccagaatcagccctattgtcggggactgccggatcctcaggacatcattagccaaagccttcaatcgccttctcagcaagctgccaaatccttttatgatcgaatcagtttccttataggatctgatagcacccatgttatacctggagaaagtcctttcaataagagccttgcatctgtcatcagaggccaagtactgactgctgatggaactccacttattggagtaaatgtctcgtttttccattacccagaatatggatatactattacccgccaggacggaatgtttgacttggtggcaaatggtggggcctctctaactttggtatttgaacgatccccattcctcactcagtatcatactgtgtggattccatggaatgtcttttatgtgatggataccctagtcatggagaaagaagagaatgacattcccagctgtgatctgagtggattcgtgaggccaaatcccatcattgtgtcatcacctttatccacctttttcagatcttctcctgaagacagtcccatcattcccgaaacacaggtactccacgaggaaactacaattccaggaacagatttgaaactctcctacttgagttccagagctgcagggtataagtcagttctcaagatcaccatgacccagtctattattccatttaatttaatgaaggttcatcttatggtagctgtagtaggaagactcttccaaaagtggtttcctgcctcaccaaacttggcctatactttcatatgggataaaacagatgcatataatcagaaagtctatggtctatctgaagctgttgtgtcagttggatatgagtatgagtcgtgtttggacctgactctgtgggaaaagaggactgccattctgcagggctatgaattggatgcgtccaacatgggtggctggacattagataaacatcacgtgctggatgtacagaacggtatactgtacaagggaaacggggaaaaccagttcatctcccagcagcctccagtcgtgagtagcatcatgggcaatgggcgaaggcgcagcatttcctgccccagttgcaatggtcaagctgatggtaacaagttactggccccagtggcgctagcttgtgggatcgatggcagtctgtacgtaggcgatttcaactacgtgcggcggatattcccttctggaaatgtaacaagtgtcttagaactaagaaataaagattttagacatagcagcaacccagctcatagatactaccttgcaacggatccagtcacgggagatctgtacgtttctgacacaaacacccgcagaatttatcgcccaaagtcacttacgggggcaaaagacttgactaaaaatgcagaagtcgtcgcagggacaggggagcaatgccttccgtttgacgaggcgagatgtggggatggagggaaggccgtggaagccacactcatgagtcccaaaggaatggcagttgataagaatggattaatctactttgttgatggaaccatgattaggaaagttgaccaaaatggaatcatatcaactcttctgggctctaacgatttgacttcagccagacctttaacttgtgacaccagcatgcacatcagccaggtacgtctggaatggcccactgacctagccattaaccctatggataactccatttatgtcctggataataatgtagttttacagatcactgaaaatcgtcaagttcgcattgctgctggacggcccatgcactgtcaggttcccggagtggaatatcctgtggggaagcacgcggtgcagacaacactggaatcagccactgccattgctgtgtcctacagtggggtcctgtacattactgaaactgatgagaagaaaattaaccggataaggcaggtcacaacagatggagaaatctccttagtggccggaataccttcagagtgtgactgcaaaaatgatgccaactgtgactgttaccagagtggagatggctacgccaaggatgccaaactcagtgccccatcctccctggctgcttctccagatggtacactgtatattgcagatctagggaatatccggatccgggctgtgtcaaagaataagcctttacttaactctatgaacttctatgaagttgcgtctccaactgatcaagaactctacatctttgacatcaatggtactcaccaatatactgtaagtttagtcactggtgattacctttacaattttagctacagcaatgacaatgatattactgctgtgacagacagcaatggcaacacccttagaattagacgggacccaaatcgcatgccagttcgagtggtgtctcctgataaccaagtgatatggttgacaataggaacaaatggatgtttgaaaggcatgactgctcaaggactggaattagttttgtttacttaccatggcaatagtggccttttagccactaaaagtgatgaaactggatggacaacgttttttgactatgacagtgaaggtcgtctgacaaatgttacgtttccaactggagtggtcacaaacctgcatggggacatggacaaggctatcacagtggacattgagtcatctagccgagaagaagatgtcagcatcacttcaaatctgtcctcgatcgattctttctacaccatggttcaagatcagttaagaaacagctaccagattggttatgacggctccctcagaattatctacgccagtggcctggactcacactaccaaacagagccgcacgttctggctggcaccgctaatccgacggttgccaaaagaaacatgactttgcctggcgagaacggtcaaaacttggtggaatggagattccgaaaagagcaagcccaagggaaagtcaatgtctttggccgcaagctcagggttaatggcagaaacctcctttcagttgactttgatcgaacaacaaagacagaaaagatctatgacgaccaccgtaaatttctactgaggatcgcctacgacacgtctgggcacccgactctctggctgccaagcagcaagctgatggccgtcaatgtcacctattcatccacaggtcaaattgccagcatccagcgaggcaccactagcgagaaagtagattatgacggacaggggaggatcgtgtctcgggtctttgctgatggtaaaacatggagttacacatatttagaaaagtccatggttcttctgcttcatagccagcggcagtacatcttcgaatacgatatgtgggaccgcctgtctgccatcaccatgcccagtgtggctcgccacaccatgcagaccatccgatccattggctactaccgcaacatatacaaccccccggaaagcaacgcctccatcatcacggactacaacgaggaagggctgcttctacaaacagctttcttgggtacaagtcggagggtcttattcaaatacagaaggcagactaggctctcagaaattttatatgatagcacaagagtcagttttacctatgatgaaacagcaggagtcctaaagacagtaaacctccagagtgatggttttatttgcaccattagatacaggcaaattggtcccctgattgacaggcagattttccgctttagtgaagatgggatggtaaatgcaagatttgactatagctatgacaacagctttcgagtgaccagcatgcagggtgtgatcaatgaaacgccactgcctattgatctgtatcagtttgatgacatttctggcaaagttgagcagtttggaaagtttggagttatatattatgatattaaccagatcatttctacagctgtaatgacctatacgaagcactttgatgctcatggccgtatcaaggagattcaatatgagatattcaggtcgctcatgtactggattacaattcagtatgataacatgggtcgggtaaccaagagagagattaaaatagggccctttgccaacaccaccaaatatgcttatgaatatgatgttgatggacagctccaaacagtttacctcaatgaaaagataatgtggcggtacaactacgatctgaatggaaacctccatttactgaacccaagtaacagtgcgcgtctgacaccccttcgctatgacctgcgagacagaatcactcgactgggtgatgttcaatatcggttggatgaagatggtttcctacgtcaaaggggcacggaaatctttgaatatagctccaaggggcttctaactcgagtttacagtaaaggcagtggctggacagtgatctaccgttatgacggcctgggaaggcgtgtttctagcaaaaccagtctaggacagcacctgcagtttttttatgctgacttaacttatcccactaggattactcatgtctacaaccattcgagttcagaaattacctccctgtattatgatctccaaggacatctttttgccatggaaatcagcagtggggatgaattctatattgcatcggataacacagggacaccactggctgtgttcagtagcaatgggcttatgctgaaacagattcagtacactgcatatggggaaatctattttgactctaatattgactttcaactggtaattggatttcatggtggcctgtatgacccactcaccaaattaatccactttggagaaagagattatgacattttggcaggacggtggacaacacctgacatagaaatctggaaaagaattgggaaggacccagctccttttaacttgtacatgtttaggaataacaaccctgcaagcaaaatccatgacgtgaaagattacatcacagatgttaacagctggctggtgacatttggtttccatctgcacaatgctattcctggattccctgttcccaaatttgatttaacagaaccttcttacgaacttgtgaagagtcagcagtgggatgatataccgcccatcttcggagtccagcagcaagtggcgcggcaggccaaggccttcctgtcgctggggaagatggccgaggtgcaggtgagccggcgccgggccggcggcgcgcagtcctggctgtggttcgccacggtcaagtcgctgatcggcaagggcgtcatgctggccgtcagccagggccgcgtgcagaccaacgtgctcaacatcgccaacgaggactgcatcaaggtggcggccgtgctcaacaacgccttctacctggagaacctgcacttcaccatcgagggcaaggacacgcactacttcatcaagaccaccacgcccgagagcgacctgggcacgctgcggttgaccagcggccgcaaggcgctggagaacggcatcaacgtgacggtgtcgcagtccaccacggtggtgaacggcaggacgcgcaggttcgcggacgtggagatgcagttcggcgcgctggcgctgcacgtgcgctacggcatgaccctggacgaggagaaggcgcgcatcctggagcaggcgcggcagcgcgcgctcgcccgggcctgggcgcgcgagcagcagcgcgtgcgcgacggcgaggagggcgcgcgcctctggacggagggcgagaagcggcagctgctgagcgccggcaaggtgcagggctacgacgggtactacgtactctcggtggagcagtaccccgagctggccgacagcgccaacaacatccagttcctgcggcagagcgagatcggcaggaggtaacgcccgggccgcgcccgccgagccgctcacgccctgcccacattgtcctgtggcacaacccgagtgggactctccaacgcccaagagccttcctcccgggggaatgagactgctgttacgacccacacccacaccgcgaaaacaaggaccgcttttttccgaatgaccttaaaggtgatcggctttaacgaatatgtttacatatgcatagcgctgcactcagtcggactgaacgtagccagaggaaaaaaaaatcatcaaggacaaaggcctcgacctgttgcgctgggccgtctgttccttctaggcactgtatttaactaacttta

SEQ ID NO: 522 - protein, 2721 aa, Homo sapiens
MDVKERRPYCSLTKSRREKERRYTNSSADNEECRVPTQKSYSSSETLKAFDHDSSRLLYGNRVKDLVHREADEFTRQGQNFTLRQLGVCEPATRRGLAFCAEMGLPHRGYSISAGSDADTENEAVMSPEHAMRLWGRGVKSGRSSCLSSRSNSALTLTDTEHENKSDSENEQPASNQGQSTLQPLPPSHKQHSAQHHPSITSLNRNSLTNRRNQSPAPPAALPAELQTTPESVQLQDSWVLGSNVPLESRHFLFKTGTGTTPLFSTATPGYTMASGSVYSPPTRPLPRNTLSRSAFKFKKSSKYCSWKCTALCAVGVSVLLAILLSYFIAMHLFGLNWQLQQTENDTFENGKVNSDTMPTNTVSLPSGDNGKLGGFTQENNTIDSGELDIGRRAIQEIPPGIFWRSQLFIDQPQFLKFNISLQKDALIGVYGRKGLPPSHTQYDFVELLDGSRLIAREQRSLLETERAGRQARSVSLHEAGFIQYLDSGIWHLAFYNDGKNAEQVSFNTIVIESVVECPRNCHGNGECVSGTCHCFPGFLGPDCSRAACPVLCSGNGQYSKGRCLCFSGWKGTECDVPTTQCIDPQCGGRGICIMGSCACSSGYKGESCEEADCIDPGCSNHGVCIHGECHCSPGWGGSNCEILKTMCPDQCSGHGTYLQESGSCTCDPNWTGPDCSNEICSVDCGSHGVCMGGTCRCEEGWTGPACNQRACHPRCAEHGTCKDGKCECSQGWNGEHCTIAHYLDKIVKDKIGYKEGCPGLCNSNGRCTLDQNGGHCVCQPGWRGAGCDVAMETLCTDSKDNEGDGLIDCMDPDCCLQSSCQNQPYCRGLPDPQDIISQSLQSPSQQAAKSFYDRISFLIGSDSTHVIPGESPFNKSLASVIRGQVLTADGTPLIGVNVSFFHYPEYGYTITRQDGMFDLVANGGASLTLVFERSPFLTQYHTVWIPWNVFYVMDTLVMEKEENDIPSCDLSGFVRPNPIIVSSPLSTFFRSSPEDSPIIPETQVLHEETTIPGTDLKLSYLSSRAAGYKSVLKITMTQSIIPFNLMKVHLMVAVVGRLFQKWFPASPNLAYTFIWDKTDAYNQKVYGLSEAVVSVGYEYESCLDLTLWEKRTAILQGYELDASNMGGWTLDKHHVLDVQNGILYKGNGENQFISQQPPVVSSIMGNGRRRSISCPSCNGQADGNKLLAPVALACGIDGSLYVGDFNYVRRIFPSGNVTSVLELRNKDFRHSSNPAHRYYLATDPVTGDLYVSDTNTRRIYRPKSLTGAKDLTKNAEVVAGTGEQCLPFDEARCGDGGKAVEATLMSPKGMAVDKNGLIYFVDGTMIRKVDQNGIISTLLGSNDLTSARPLTCDTSMHISQVRLEWPTDLAINPMDNSIYVLDNNVVLQITENRQVRIAAGRPMHCQVPGVEYPVGKHAVQTTLESATAIAVSYSGVLYITETDEKKINRIRQVTTDGEISLVAGIPSECDCKNDANCDCYQSGDGYAKDAKLSAPSSLAASPDGTLYIADLGNIRIRAVSKNKPLLNSMNFYEVASPTDQELYIFDINGTHQYTVSLVTGDYLYNFSYSNDNDITAVTDSNGNTLRIRRDPNRMPVRVVSPDNQVIWLTIGTNGCLKGMTAQGLELVLFTYHGNSGLLATKSDETGWTTFFDYDSEGRLTNVTFPTGVVTNLHGDMDKAITVDIESSSREEDVSITSNLSSIDSFYTMVQDQLRNSYQIGYDGSLRIIYASGLDSHYQTEPHVLAGTANPTVAKRNMTLPGENGQNLVEWRFRKEQAQGKVNVFGRKLRVNGRNLLSVDFDRTTKTEKIYDDHRKFLLRIAYDTSGHPTLWLPSSKLMAVNVTYSSTGQIASIQRGTTSEKVDYDGQGRIVSRVFADGKTWSYTYLEKSMVLLLHSQRQYIFEYDMWDRLSAITMPSVARHTMQTIRSIGYYRNIYNPPESNASIITDYNEEGLLLQTAFLGTSRRVLFKYRRQTRLSEILYDSTRVSFTYDETAGVLKTVNLQSDGFICTIRYRQIGPLIDRQIFRFSEDGMVNARFDYSYDNSFRVTSMQGVINETPLPIDLYQFDDISGKVEQFGKFGVIYYDINQIISTAVMTYTKHFDAHGRIKEIQYEIFRSLMYWITIQYDNMGRVTKREIKIGPFANTTKYAYEYDVDGQLQTVYLNEKIMWRYNYDLNGNLHLLNPSNSARLTPLRYDLRDRITRLGDVQYRLDEDGFLRQRGTEIFEYSSKGLLTRVYSKGSGWTVIYRYDGLGRRVSSKTSLGQHLQFFYADLTYPTRITHVYNHSSSEITSLYYDLQGHLFAMEISSGDEFYIASDNTGTPLAVFSSNGLMLKQIQYTAYGEIYFDSNIDFQLVIGFHGGLYDPLTKLIHFGERDYDILAGRWTTPDIEIWKRIGKDPAPFNLYMFRNNNPASKIHDVKDYITDVNSWLVTFGFHLHNAIPGFPVPKFDLTEPSYELVKSQQWDDIPPIFGVQQQVARQAKAFLSLGKMAEVQVSRRRAGGAQSWLWFATVKSLIGKGVMLAVSQGRVQTNVLNIANEDCIKVAAVLNNAFYLENLHFTIEGKDTHYFIKTTTPESDLGTLRLTSGRKALENGINVTVSQSTTVVNGRTRRFADVEMQFGALALHVRYGMTLDEEKARILEQARQRALARAWAREQQRVRDGEEGARLWTEGEKRQLLSAGKVQGYDGYYVLSVEQYPELADSANNIQFLRQSEIGRR

SEQ ID NO: 523 - DNA, 810 bp, Homo sapiens
  CDS (7)..(804)
aagctttgtccccgaaattgccatggaaatggagaatgcgtttctggaacttgccattgttttccaggatttctgggtccggattgttcaagagccgcctgtccagtgttatgtagtggcaacgggcagtactccaagggccgctgcctgtgtttcagcggctggaagggcaccgagtgtgatgtgccgactacccagtgtattgacccacagtgtgggggtcgtgggatttgtatcatgggctcttgtgcttgcaactcaggatacaaaggagaaagttgtgaagaagctgactgtatagaccctgggtgttctaatcatggtgtgtgtatccacggggaatgtcactgcagtccaggatggggaggtagcaattgtgaaatactgaagaccatgtgtccagaccagtgctccggccacggaacgtatcttcaagaaagtggctcctgcacgtgtgaccctaactggactggcccagactgctcaaacgaaatatgttctgtggactgtggctcacacggcgtttgcatgggggggacgtgtcgctgtgaagaaggctggacgggcccagcctgtaatcagagagcctgccacccccgctgtgccgagcacgggacctgcaaggatggcaagtgtgaatgcagccagggctggaatggagagcactgcactatcgctcactatttggataagatagttaaagagggttgtcctggtctgtgcaacagcaatggaagatgtaccctggaccaaaatggctggcattgtgtgtgccagcctggatggagaggagcaggctgtgacgtcgac

SEQ ID NO: 524 - protein, 266 aa, Homo sapiens
CPRNCHGNGECVSGTCHCFPGFLGPDCSRAACPVLCSGNGQYSKGRCLCFSGWKGTECDVPTTQCIDPQCGGRGICIMGSCACNSGYKGESCEEADCIDPGCSNHGVCIHGECHCSPGWGGSNCEILKTMCPDQCSGHGTYLQESGSCTCDPNWTGPDCSNEICSVDCGSHGVCMGGTCRCEEGWTGPACNQRACHPRCAEHGTCKDGKCECSQGWNGEHCTIAHYLDKIVKEGCPGLCNSNGRCTLDQNGWHCVCQPGWRGAGCD

SEQ ID NO: 525 - DNA, 8204 bp, Homo sapiens
  CDS (4)..(8178)
agtatggatgtgaaagaacgcaggccttactgctccctgaccaagagcagacgagagaaggaacggcgctacacaaattcctccgcagacaatgaggagtgccgggtacccacacagaagtcctacagttccagcgagacattgaaagcttttgatcatgattcctcgcggctgctttacggcaacagagtgaaggatttggttcacagagaagcagacgagttcactagacaaggacagaattttaccctaaggcagttaggagtttgtgaaccagcaactcgaagaggactggcattttgtgcggaaatggggctccctcacagaggttactctatcagtgcagggtcagatgctgatactgaaaatgaagcagtgatgtccccagagcatgccatgagactttggggcaggggggtcaaatcaggccgcagctcctgcctgtcaagtcggtccaactcagccctcaccctgacagatacggagcacgaaaacaagtccgacagtgagaatgagcaacctgcaagcaatcaaggccagtctaccctgcagcccttgccgccttcccataagcagcactctgcacagcatcatccatccatcacttctctcaacagaaactccctgaccaatagaaggaaccagagtccggccccgccggctgctttgcccgccgagctgcaaaccacacccgagtccgtccagctgcaggacagctgggtccttggcagtaatgtaccactggaaagcaggcatttcctattcaaaacaggaacaggtacaacgccactgttcagtactgcaaccccaggatacacaatggcatctggctctgtttattcaccacctactcggccactacctagaaacaccctatcaagaagtgcttttaaattcaagaagtcttcaaagtactgtagctggaaatgcactgcactgtgtgccgtaggggtctcggtgctcctggcaatactcctgtcttattttatagcaatgcatctctttggcctcaactggcagctacagcagactgaaaatgacacatttgagaatggaaaagtgaattctgataccatgccaacaaacactgtgtcattaccttctggagacaatggaaaattaggtggatttacgcaagaaaataacaccatagattccggagaacttgatattggccgaagagcaattcaagagattcctcccgggatcttctggagatcacagctcttcattgatcagccacagtttcttaaattcaatatctctcttcagaaggatgcattgattggagtatatggccggaagaagttaccgccttcccatactcagtcctccccccagtatgacttcgtggagctcctggatggcagcaggctgattgccagagagcagcggagcctgcttgagacggagagagccgggcggcaggcgagatccgtcagccttcatgaggccggctttatccagtacttggattctggaatctggcatctggctttttataatgatgggaaaaatgcagagcaggtgtcttttaataccattgttatagagtctgtggtggaatgtccccgaaattgccatggaaatggagaatgcgtttctggaacttgccattgttttccaggatttctgggtccggattgttcaagagccgcctgtccagtgttatgtagtggcaacgggcagtactccaagggccgctgcctgtgtttcagcggctggaagggcaccgagtgtgatgtgccgactacccagtgtattgacccacagtgtgggggtcgtgggatttgtatcatgggctcctgtgcttgcagctcaggatacaaaggagaaagttgtgaagaagctgactgtatagaccctgggtgttctaatcatggtgtgtgtatccacggggaatgtcactgcagtccaggatggggaggtagcaattgtgaaatactgaagaccatgtgtccagaccagtgctccggccacggaacgtatcttcaagaaagtggctcctgcacgtgtgaccctaactggactggcccagactgctcaaacgaaatatgttctgtggactgtggctcacacggcgtttgcatgggggggacgtgtcgctgtgaagaaggctggacgggcccagcctgtaatcagagagcctgccacccccgctgtgccgagcacgggacctgcaaggatggcaagtgtgaatgcagccagggctggaatggagagcactgcactatcgctcactatttggataagatagttaaagacaagataggatataaagagggttgtcctggtctgtgcaacagcaatggaagatgtaccctggaccaaaatggcggacattgtgtgtgccagcctggatggagaggagcaggctgtgacgtagccatggagactctttgcacagatagcaaggacaatgaaggggatggactcattgactgcatggatcccgattgctgcctacagagttcctgccagaatcagccctattgtcggggactgccggatcctcaggacatcattagccaaagccttcaatcgccttctcagcaagctgccaaatccttttatgatcgaatcagtttccttataggatctgatagcacccatgttatacctggagaaagtcctttcaataagagccttgcatctgtcatcagaggccaagtactgactgctgatggaactccacttattggagtaaatgtctcgtttttccattacccagaatatggatatactattacccgccaggacggaatgtttgacttggtggcaaatggtggggcctctctaactttggtatttgaacgatccccattcctcactcagtatcatactgtgtggattccatggaatgtcttttatgtgatggataccctagtcatggagaaagaagagaatgacattcccagctgtgatctgagtggattcgtgaggccaaatcccatcattgtgtcatcacctttatccacctttttcagatcttctcctgaagacagtcccatcattcccgaaacacaggtactccacgaggaaactacaattccaggaacagatttgaaactctcctacttgagttccagagctgcagggtataagtcagttctcaagatcaccatgacccagtctattattccatttaatttaatgaaggttcatcttatggtagctgtagtaggaagactcttccaaaagtggtttcctgcctcaccaaacttggcctatactttcatatgggataaaacagatgcatataatcagaaagtctatggtctatctgaagctgttgtgtcagttggatatgagtatgagtcgtgtttggacctgactctgtgggaaaagaggactgccattctgcagggctatgaattggatgcgtccaacatgggtggctggacattagataaacatcacgtgctggatgtacagaacggtatactgtacaagggaaacggggaaaaccagttcatctcccagcagcctccagtcgtgagtagcatcatgggcaatgggcgaaggcgcagcatttcctgccccagttgcaatggtcaagctgatggtaacaagttactggccccagtggcgctagcttgtgggatcgatggcagtctgtacgtaggcgatttcaactacgtgcggcggatattcccttctggaaatgtaacaagtgtcttagaactaagaaataaagattttagacatagcagcaacccagctcatagatactaccttgcaacggatccagtcacgggagatctgtacgtttctgacacaaacacccgcagaatttatcgcccaaagtcacttacgggggcaaaagacttgactaaaaatgcagaagtcgtcgcagggacaggggagcaatgccttccgtttgacgaggcgagatgtggggatggagggaaggccgtggaagccacactcatgagtcccaaaggaatggcagttgataagaatggattaatctactttgttgatggaaccatgattaggaaagttgaccaaaatggaatcatatcaactcttctgggctctaacgatttgacttcagccagacctttaacttgtgacaccagcatgcacatcagccaggtacgtctggaatggcccactgacctagccattaaccctatggataactccatttatgtcctggataataatgtagttttacagatcactgaaaatcgtcaagttcgcattgctgctggacggcccatgcactgtcaggttcccggagtggaatatcctgtggggaagcacgcggtgcagacaacactggaatcagccactgccattgctgtgtcctacagtggggtcctgtacattactgaaactgatgagaagaaaattaaccggataaggcaggtcacaacagatggagaaatctccttagtggccggaataccttcagagtgtgactgcaaaaatgatgccaactgtgactgttaccagagtggagatggctacgccaaggatgccaaactcagtgccccatcctccctggctgcttctccagatggtacactgtatattgcagatctagggaatatccggatccgggctgtgtcaaagaataagcctttacttaactctatgaacttctatgaagttgcgtctccaactgatcaagaactctacatctttgacatcaatggtactcaccaatatactgtaagtttagtcactggtgattacctttacaattttagctacagcaatgacaatgatattactgctgtgacagacagcaatggcaacacccttagaattagacgggacccaaatcgcatgccagttcgagtggtgtctcctgataaccaagtgatatggttgacaataggaacaaatggatgtttgaaaggcatgactgctcaaggactggaattagttttgtttacttaccatggcaatagtggccttttagccactaaaagtgatgaaactggatggacaacgttttttgactatgacagtgaaggtcgtctgacaaatgttacgtttccaactggagtggtcacaaacctgcatggggacatggacaaggctatcacagtggacattgagtcatctagccgagaagaagatgtcagcatcacttcaaatctgtcctcgatcgattctttctacaccatggttcaagatcagttaagaaacagctaccagattggttatgacggctccctcagaattatctacgccagtggcctggactcacactaccaaacagagccgcacgttctggctggcaccgctaatccgacggttgccaaaagaaacatgactttgcctggcgagaacggtcaaaacttggtggaatggagattccgaaaagagcaagcccaagggaaagtcaatgtctttggccgcaagctcagggttaatggcagaaacctcctttcagttgactttgatcgaacaacaaagacagaaaagatctatgacgaccaccgtaaatttctactgaggatcgcctacgacacgtctgggcacccgactctctggctgccaagcagcaagctgatggccgtcaatgtcacctattcatccacaggtcaaattgccagcatccagcgaggcaccactagcgagaaagtagattatgacggacaggggaggatcgtgtctcgggtctttgctgatggtaaaacatggagttacacatatttagaaaagtccatggttcttctgcttcatagccagcggcagtacatcttcgaatacgatatgtgggaccgcctgtctgccatcaccatgcccagtgtggctcgccacaccatgcagaccatccgatccattggctactaccgcaacatatacaaccccccggaaagcaacgcctccatcatcacggactacaacgaggaagggctgcttctacaaacagctttcttgggtacaagtcggagggtcttattcaaatacagaaggcagactaggctctcagaaattttatatgatagcacaagagtcagttttacctatgatgaaacagcaggagtcctaaagacagtaaacctccagagtgatggttttatttgcaccattagatacaggcaaattggtcccctgattgacaggcagattttccgctttagtgaagatgggatggtaaatgcaagatttgactatagctatgacaacagctttcgagtgaccagcatgcagggtgtgatcaatgaaacgccactgcctattgatctgtatcagtttgatgacatttctggcaaagttgagcagtttggaaagtttggagttatatattatgatattaaccagatcatttctacagctgtaatgacctatacgaagcactttgatgctcatggccgtatcaaggagattcaatatgagatattcaggtcgctcatgtactggattacaattcagtatgataacatgggtcgggtaaccaagagagagattaaaatagggccctttgccaacaccaccaaatatgcttatgaatatgatgttgatggacagctccaaacagtttacctcaatgaaaagataatgtggcggtacaactacgatctgaatggaaacctccatttactgaacccaagtaacagtgcgcgtctgacaccccttcgctatgacctgcgagacagaatcactcgactgggtgatgttcaatatcggttggatgaagatggtttcctacgtcaaaggggcacggaaatctttgaatatagctccaaggggcttctaactcgagtttacagtaaaggcagtggctggacagtgatctaccgttatgacggcctgggaaggcgtgtttctagcaaaaccagtctaggacagcacctgcagtttttttatgctgacttaacttatcccactaggattactcatgtctacaaccattcgagttcagaaattacctccctgtattatgatctccaaggacatctttttgccatggaaatcagcagtggggatgaattctatattgcatcggataacacagggacaccactggctgtgttcagtagcaatgggcttatgctgaaacagattcagtacactgcatatggggaaatctattttgactctaatattgactttcaactggtaattggatttcatggtggcctgtatgacccactcaccaaattaatccactttggagaaagagattatgacattttggcaggacggtggacaacacctgacatagaaatctggaaaagaattgggaaggacccagctccttttaacttgtacatgtttaggaataacaaccctgcaagcaaaatccatgacgtgaaagattacatcacagatgttaacagctggctggtgacatttggtttccatctgcacaatgctattcctggattccctgttcccaaatttgatttaacagaaccttcttacgaacttgtgaagagtcagcagtgggatgatataccgcccatcttcggagtccagcagcaagtggcgcggcaggccaaggccttcctgtcgctggggaagatggccgaggtgcaggtgagccggcgccgggccggcggcgcgcagtcctggctgtggttcgccacggtcaagtcgctgatcggcaagggcgtcatgctggccgtcagccagggccgcgtgcagaccaacgtgctcaacatcgccaacgaggactgcatcaaggtggcggccgtgctcaacaacgccttctacctggagaacctgcacttcaccatcgagggcaaggacacgcactacttcatcaagaccaccacgcccgagagcgacctgggcacgctgcggttgaccagcggccgcaaggcgctggagaacggcatcaacgtgacggtgtcgcagtccaccacggtggtgaacggcaggacgcgcaggttcgcggacgtggagatgcagttcggcgcgctggcgctgcacgtgcgctacggcatgaccctggacgaggagaaggcgcgcatcctggagcaggcgcggcagcgcgcgctcgcccgggcctgggcgcgcgagcagcagcgcgtgcgcgacggcgaggagggcgcgcgcctctggacggagggcgagaagcggcagctgctgagcgccggcaaggtgcagggctacgacgggtactacgtactctcggtggagcagtaccccgagctggccgacagcgccaacaacatccagttcctgcggcagagcgagatcggcaggaggtaacgcccgggccgcgcccgccgagc

SEQ ID NO: 526 - protein, 2725 aa, Homo sapiens; identical to SEQ ID NO: 486

SEQ ID NO: 527 - DNA, 1833 bp, Homo sapiens; identical to SEQ ID NO: 509
  CDS (7)..(1827)

SEQ ID NO: 528 - protein, 607 aa, Homo sapiens
DQNGGHCVCQPGWRGAGCDVAMETLCTDSKDNEGDGLIDCMDPDCCLQSSCQNQPYCRGLPDPQDIISQSLQSPSQQAAKSFYDRISFLIGSDSTHVIPGESPFNKSLASVIRGQVLTADGTPLIGVNVSFFHYPEYGYTITRQDGMFDLVANGGASLTLVFERSPFLTQYHTVWIPWNVFYVMDTLVMKKEENDIPSCDLSGFVRPNPIIVSSPLSTFFRSSPEDSPIIPETQVLHEETTIPGTDLKLSYLSSRAAGYKSVLKITMTQSIIPFNLMKVHLMVAVVGRLFQKWFPASPNLAYTFIWDKTDAYNQKVYGLSEAVVSVGYEYESCLDLTLWEKRTAILQGYELDASNMGGWTLDKHHVLDVQNGILYKGNGENQFISQQPPVVSSIMGNGRRRSISCPSCNGQADGNKLLAPVALACGIDGSLYVGDFNYVRRIFPSGNVTSVLELSSNPAHRYYLATDPVTGDLYVSDTNTRRIYRPKSLTGAKDLTKNAEVVAGTGEQCLPFDEARCGDGGKAVEATLMSPKGMAVDKNGLIYFVDGTMIRKVDQNGIISTLLGSNDLTSARPLTCDTSMHISQVRLEWPTDLAINPMDNSIYVLDN

SEQ ID NO: 529 - DNA, 8487 bp, Homo sapiens
  CDS (299)..(8137)
actcactatagggctcgagcggccgcccgggcaggtcccatttgacagaaaaaggcagtaaacggggaatctctttttttgaataaagaagaagaagaaataaagtacctgtcatcttgacaagtggcggagcggaggagtcaaggattataaatgatcacagccaggtccagctcgccccgtgattgggctctcccgcgatctgcaccgggggaagcgcatgagaggccaatgagacttgaaccctgagcctaagttgtcaccagcaggactgatgtgcacacagaaggaatgaagtatggatgtgaaagaacgcaggccttactgctccctgaccaagagcagacgagagaaggaacggcgctacacaaattcctccgcagacaatgaggagtgccgggtacccacacagaagtcctacagttccagcgagacattgaaagcttttgatcatgattcctcgcggctgctttacggcaacagagtgaaggatttggttcacagagaagcagacgagttcactagacaagagcaacctgcaagcaatcaaggccagtctaccctgcagcccttgccgccttcccataagcagcactctgcacagcatcatccatccatcacttctctcaacagaaactccctgaccaatagaaggaaccagagtccggccccgccggctgctttgcccgccgagctgcaaaccacacccgagtccgtccagctgcaggacagctgggtccttggcagtaatgtaccactggaaagcaggcatttcctattcaaaacaggaacaggtacaacgccactgttcagtactgcaaccccaggatacacaatggcatctggctctgtttattcaccacctactcggccactacctagaaacaccctatcaagaagtgcttttaaattcaagaagtcttcaaagtactgtagctggaaatgcactgcactgtgtgccgtaggggtctcggtgctcctggcaatactcctgtcttattttatagcaatgcatctctttggcctcaactggcagctacagcagactgaaaatgacacatttgagaatggaaaagtgaattctgataccatgccaacaaacactgtgtcattaccttctggagacaatggaaaattaggtggatttacgcaagaaaataacaccatagattccggagaacttgatattggccgaagagcaattcaagagattcctcccgggatcttctggagatcacagctcttcattgatcagccacagtttcttaaattcaatatctctcttcagaaggatgcattgattggagtatatggccggaaaggcttaccgccttcccatactcagtatgacttcgtggagctcctggatggcagcaggctgattgccagagagcagcggagcctgcttgagacggagagagccgggcggcaggcgagatccgtcagccttcatgaggccggctttatccagtacttggattctggaatctggcatctggctttttataatgatgggaaaaatgcagagcaggtgtcttttaataccattgttatagagtctgtggtggaatgtccccgaaattgccatggaaatggagaatgcgtttctggaacttgccattgttttccaggatttctgggtccggattgttcaagagccgcctgtccagtgttatgtagtggcaacgggcagtactccaagggccgctgcctgtgtttcagcggctggaagggcaccgagtgtgatgtgccgactacccagtgtattgacccacagtgtgggggtcgtgggatttgtatcatgggctcctgtgcttgcaactcaggatacaaaggagaaagttgtgaagaagctgactgtatagaccctgggtgttctaatcatggtgtgtgtatccacggggaatgtcactgcagtccaggatggggaggtagcaattgtgaaatactgaagaccatgtgtccagaccagtgctccggccacggaacgtatcttcaagaaagtggctcctgcacgtgtgaccctaactggactggcccagactgctcaaacgaaatatgttctgtggactgtggctcacacggcgtttgcatgggggggacgtgtcgctgtgaagaaggctggacgggcccaacctgtaatcagagagcctgccacccccgctgtgccgagcacgggacctgcaaggatggcaagtgtgaatgcagccatggctggaatggagagcactgcactatcgagggttgtcctggtctgtgcaacagcaatggaagatgtaccctggaccaaaatggctggcattgtgtgtgccagcctggatggagaggagcaggctgtgacgtagccatggagactctttgcacagatagcaaggacaatgaaggagatggactcattgactgcatggatcccgattgctgcctacagagttcctgccagaatcagccctattgtcggggactgccggatcctcaggacatcattagccaaagccttcaatcgccttctcagcaagctgccaaatccttttatgatcgaatcagtttccttataggatctgatagcacccatgttatacctggagaaagtcctttcaataagagccttgcatctgtcatcagaggccaagtactgactgctgatggaactccacttattggagtaaatgtctcgtttttccattacccagaatatggatatactattacccgccaggacggaatgtttgacttggtggcaaatggtggggcctctctaactttggtatttgaacgatccccattcctcactcagtatcatactgtgtggattccatggaatgtcttttatgtgatggataccctagtcatggagaaagaagagaatgacattcccagctgtgatctgagtggattcgtgaggccaaatcccatcattgtgtcatcacctttatccacctttttcagatcttctcctgaagacagtcccatcattcccgaaacacaggtactccacgaggaaactacaattccaggaacagatttgaaactctcctacttgagttccagagctgcagggtataagtcagttctcaagatcaccatgacccagtctattattccatttaatttaatgaaggttcatcttatggtagctgtagtaggaagactcttccaaaagtggtttcctgcctcaccaaacttggcctatactttcatatgggataaaacagatgcatataatcagaaagtctatggtctatctgaagctgttgtgtcagttggatatgagtatgagtcgtgtttggacctgactctgtgggaaaagaggactgccattctgcagggctatgaattggatgcgtccaacatgggtggctggacattagataaacatcacgtgctggatgtacagaacggtatactgtacaagggaaacggggaaaaccagttcatctcccagcagcctccagtcgtgagtagcatcatgggcaatgggcgaaggcgcagcatttcctgccccagttgcaatggtcaagctgatggtaacaagttactggccccagtggcgctagcttgtgggatcgatggcagtctgtacgtaggcgatttcaactacgtgcggcggatattcccttctggaaatgtaacaagtgtcttagaactaagaaataaagattttagacatagcagcaacccagctcatagatactaccttgcaacggatccagtcacgggagatctgtacgtttctgacacaaacacccgcagaatttatcgcccaaagtcacttacgggggcaaaagacttgactaaaaatgcagaagtcgtcgcagggacaggggagcaatgccttccgtttgacgaggcgagatgtggggatggagggaaggccgtggaagccacactcatgagtcccaaaggaatggcagttgataagaatggattaatctactttgttgatggaaccatgattaggaaagttgaccaaaatggaatcatatcaactcttctgggctctaacgatttgacttcagccagacctttaacttgtgacaccagcatgcacatcagccaggtacgtctggaatggcccactgacctagccattaaccctatggataactccatttatgtcctggataataatgtagttttacagatcactgaaaatcgtcaagttcgcattgctgctggacggcccatgcactgtcaggttcccggagtggaatatcctgtggggaagcacgcggtgcagacaacactggaatcagccactgccattgctgtgtcctacagtggggtcctgtacattactgaaactgatgagaagaaaattaaccggataaggcaggtcacaacagatggagaaatctccttagtggccggaataccttcagagtgtgactgcaaaaatgatgccaactgtgactgttaccagagtggagatggctacgccaaggatgccaaactcagtgccccatcctccctggctgcttctccagatggtacactgtatattgcagatctagggaatatccggatccgggctgtgtcaaagaataagcctttacttaactctatgaacttctatgaagttgcgtctccaactgatcaagaactctacatctttgacatcaatggtactcaccaatatactgtaagtttagtcactggtgattacctttacaattttagctacagcaatgacaatgatattactgctgtgacagacagcaatggcaacacccttagaattagacgggacccaaatcgcatgccagttcgagtggtgtctcctgataaccaagtgatatggttgacaataggaacaaatggatgtttgaaaggcatgactgctcaaggactggaattagttttgtttacttaccatggcaatagtggccttttagccactaaaagtgatgaaactggatggacaacgttttttgactatgacagtgaaggtcgtctgacaaatgttacgtttccaactggagtggtcacaaacctgcatggggacatggacaaggctatcacagtggacattgagtcatctagccgagaagaagatgtcagcatcacttcaaatctgtcctcgatcgattctttctacaccatggttcaagatcagttaagaaacagctaccagattggttatgacggctccctcagaattatctacgccagtggcctggactcacactaccaaacagagccgcacgttctggctggcaccgctaatccgacggttgccaaaagaaacatgactttgcctggcgagaacggtcaaaacttggtggaatggagattccgaaaagagcaagcccaagggaaagtcaatgtctttggccgcaagctcagggttaatggcagaaacctcctttcagttgactttgatcgaacaacaaagacagaaaagatctatgacgaccaccgtaaatttctactgaggatcgcctacgacacgtctgggcacccgactctctggctgccaagcagcaagctgatggccgtcaatgtcacctattcatccacaggtcaaattgccagcatccagcgaggcaccactagcgagaaagtagattatgacggacaggggaggatcgtgtctcgggtctttgctgatggtaaaacatggagttacacatatttagaaaagtccatggttcttctgcttcatagccagcggcagtacatcttcgaatacgatatgtgggaccgcctgtctgccatcaccatgcccagtgtggctcgccacaccatgcagaccatccgatccattggctactaccgcaacatatacaaccccccggaaagcaacgcctccatcatcacggactacaacgaggaagggctgcttctacaaacagctttcttgggtacaagtcggagggtcttattcaaatacagaaggcagactaggctctcagaaattttatatgatagcacaagagtcagttttacctatgatgaaacagcaggagtcctaaagacagtaaacctccagagtgatggttttatttgcaccattagatacaggcaaattggtcccctgattgacaggcagattttccgctttagtgaagatgggatggtaaatgcaagatttgactatagctatgacaacagctttcgagtgaccagcatgcagggtgtgatcaatgaaacgccactgcctattgatctgtatcagtttgatgacatttctggcaaagttgagcagtttggaaagtttggagttatatattatgatattaaccagatcatttctacagctgtaatgacctatacgaagcactttgatgctcatggccgtatcaaggagattcaatatgagatattcaggtcgctcatgtactggattacaattcagtatgataacatgggtcgggtaaccaagagagagattaaaatagggccctttgccaacaccaccaaatatgcttatgaatatgatgttgatggacagctccaaacagtttacctcaatgaaaagataatgtggcggtacaactacgatctgaatggaaacctccatttactgaacccaagtaacagtgcgcgtctgacaccccttcgctatgacctgcgagacagaatcactcgactgggtgatgttcaatatcggttggatgaagatggtttcctacgtcaaaggggcacggaaatctttgaatatagctccaaggggcttctaactcgagtttacagtaaaggcagtggctggacagtgatctaccgttatgacggcctgggaaggcgtgtttctagcaaaaccagtctaggacagcacctgcagtttttttatgctgacttaacttatcccactaggattactcatgtctacaaccattcgagttcagaaattacctccctgtattatgatctccaaggacatctttttgccatggaaatcagcagtggggatgaattctatattgcatcggataacacagggacaccactggctgtgttcagtagcaatgggcttatgctgaaacagattcagtacactgcatatggggaaatctattttgactctaatattgactttcaactggtaattggatttcatggtggcctgtatgacccactcaccaaattaatccactttggagaaagagattatgacattttggcaggacggtggacaacacctgacatagaaatctggaaaagaattgggaaggacccagctccttttaacttgtacatgtttaggaataacaaccctgcaagcaaaatccatgacgtgaaagattacatcacagatgttaacagctggctggtgacatttggtttccatctgcacaatgctattcctggattccctgttcccaaatttgatttaacagaaccttcttacgaacttgtgaagagtcagcagtgggatgatataccgcccatcttcggagtccagcagcaagtggcgcggcaggccaaggccttcctgtcgctggggaagatggccgaggtgcaggtgagccggcgccgggccggcggcgcgcagtcctggctgtggttcgccacggtcaagtcgctgatcggcaagggcgtcatgctggccgtcagccagggccgcgtgcagaccaacgtgctcaacatcgccaacgaggactgcatcaaggtggcggccgtgctcaacaacgccttctacctggagaacctgcacttcaccatcgagggcaaggacacgcactacttcatcaagaccaccacgcccgagagcgacctgggcacgctgcggttgaccagcggccgcaaggcgctggagaacggcatcaacgtgacggtgtcgcagtccaccacggtggtgaacggcaggacgcgcaggttcgcggacgtggagatgcagttcggcgcgctggcgctgcacgtgcgctacggcatgaccctggacgaggagaaggcgcgcatcctggagcaggcgcggcagcgcgcgctcgcccgggcctgggcgcgcgagcagcagcgcgtgcgcgacggcgaggagggcgcgcgcctctggacggagggcgagaagcggcagctgctgagcgccggcaaggtgcagggctacgacgggtactacgtactctcggtggagcagtaccccgagctggccgacagcgccaacaacatccagttcctgcggcagagcgagatcggcaggaggtaacgcccgggccgcgcccgccgagccgctcacgccctgcccacattgtcctgtggcacaacccgagtgggactctccaacgcccaagagccttcctcccgggggaatgagactgctgttacgacccacacccacaccgcgaaaacaaggaccgcttttttccgaatgaccttaaaggtgatcggctttaacgaatatgtttacatatgcatagcgctgcactcagtcggactgaacgtagccagaggaaaaaaaaatcatcaaggacaaaggcctcgacctgttgcgctgggccgtctgttccttctaggcactgtatttaactaactttaaaaaaaaaaaaaaaaaag

SEQ ID NO: 530 - protein, 2613 aa, Homo sapiens
MDVKERRPYCSLTKSRREKERRYTNSSADNEECRVPTQKSYSSSETLKAFDHDSSRLLYGNRVKDLVHREADEFTRQEQPASNQGQSTLQPLPPSHKQHSAQHHPSITSLNRNSLTNRRNQSPAPPAALPAELQTTPESVQLQDSWVLGSNVPLESRHFLFKTGTGTTPLFSTATPGYTMASGSVYSPPTRPLPRNTLSRSAFKFKKSSKYCSWKCTALCAVGVSVLLAILLSYFIAMHLFGLNWQLQQTENDTFENGKVNSDTMPTNTVSLPSGDNGKLGGFTQENNTIDSGELDIGRRAIQEIPPGIFWRSQLFIDQPQFLKFNISLQKDALIGVYGRKGLPPSHTQYDFVELLDGSRLIAREQRSLLETERAGRQARSVSLHEAGFIQYLDSGIWHLAFYNDGKNAEQVSFNTIVIESVVECPRNCHGNGECVSGTCHCFPGFLGPDCSRAACPVLCSGNGQYSKGRCLCFSGWKGTECDVPTTQCIDPQCGGRGICIMGSCACNSGYKGESCEEADCIDPGCSNHGVCIHGECHCSPGWGGSNCEILKTMCPDQCSGHGTYLQESGSCTCDPNWTGPDCSNEICSVDCGSHGVCMGGTCRCEEGWTGPTCNQRACHPRCAEHGTCKDGKCECSHGWNGEHCTIEGCPGLCNSNGRCTLDQNGWHCVCQPGWRGAGCDVAMETLCTDSKDNEGDGLIDCMDPDCCLQSSCQNQPYCRGLPDPQDIISQSLQSPSQQAAKSFYDRISFLIGSDSTHVIPGESPFNKSLASVIRGQVLTADGTPLIGVNVSFFHYPEYGYTITRQDGMFDLVANGGASLTLVFERSPFLTQYHTVWIPWNVFYVMDTLVMEKEENDIPSCDLSGFVRPNPIIVSSPLSTFFRSSPEDSPIIPETQVLHEETTIPGTDLKLSYLSSRAAGYKSVLKITMTQSIIPFNLMKVHLMVAVVGRLFQKWFPASPNLAYTFIWDKTDAYNQKVYGLSEAVVSVGYEYESCLDLTLWEKRTAILQGYELDASNMGGWTLDKHHVLDVQNGILYKGNGENQFISQQPPVVSSIMGNGRRRSISCPSCNGQADGNKLLAPVALACGIDGSLYVGDFNYVRRIFPSGNVTSVLELRNKDFRHSSNPAHRYYLATDPVTGDLYVSDTNTRRIYRPKSLTGAKDLTKNAEVVAGTGEQCLPFDEARCGDGGKAVEATLMSPKGMAVDKNGLIYFVDGTMIRKVDQNGIISTLLGSNDLTSARPLTCDTSMHISQVRLEWPTDLAINPMDNSIYVLDNNVVLQITENRQVRIAAGRPMHCQVPGVEYPVGKHAVQTTLESATAIAVSYSGVLYITETDEKKINRIRQVTTDGEISLVAGIPSECDCKNDANCDCYQSGDGYAKDAKLSAPSSLAASPDGTLYIADLGNIRIRAVSKNKPLLNSMNFYEVASPTDQELYIFDINGTHQYTVSLVTGDYLYNFSYSNDNDITAVTDSNGNTLRIRRDPNRMPVRVVSPDNQVIWLTIGTNGCLKGMTAQGLELVLFTYHGNSGLLATKSDETGWTTFFDYDSEGRLTNVTFPTGVVTNLHGDMDKAITVDIESSSREEDVSITSNLSSIDSFYTMVQDQLRNSYQIGYDGSLRIIYASGLDSHYQTEPHVLAGTANPTVAKRNMTLPGENGQNLVEWRFRKEQAQGKVNVFGRKLRVNGRNLLSVDFDRTTKTEKIYDDHRKFLLRIAYDTSGHPTLWLPSSKLMAVNVTYSSTGQIASIQRGTTSEKVDYDGQGRIVSRVFADGKTWSYTYLEKSMVLLLHSQRQYIFEYDMWDRLSAITMPSVARHTMQTIRSIGYYRNIYNPPESNASIITDYNEEGLLLQTAFLGTSRRVLFKYRRQTRLSEILYDSTRVSFTYDETAGVLKTVNLQSDGFICTIRYRQIGPLIDRQIFRFSEDGMVNARFDYSYDNSFRVTSMQGVINETPLPIDLYQFDDISGKVEQFGKFGVIYYDINQIISTAVMTYTKHFDAHGRIKEIQYEIFRSLMYWITIQYDNMGRVTKREIKIGPFANTTKYAYEYDVDGQLQTVYLNEKIMWRYNYDLNGNLHLLNPSNSARLTPLRYDLRDRITRLGDVQYRLDEDGFLRQRGTEIFEYSSKGLLTRVYSKGSGWTVIYRYDGLGRRVSSKTSLGQHLQFFYADLTYPTRITHVYNHSSSEITSLYYDLQGHLFAMEISSGDEFYIASDNTGTPLAVFSSNGLMLKQIQYTAYGEIYFDSNIDFQLVIGFHGGLYDPLTKLIHFGERDYDILAGRWTTPDIEIWKRIGKDPAPFNLYMFRNNNPASKIHDVKDYITDVNSWLVTFGFHLHNAIPGFPVPKFDLTEPSYELVKSQQWDDIPPIFGVQQQVARQAKAFLSLGKMAEVQVSRRRAGGAQSWLWFATVKSLIGKGVMLAVSQGRVQTNVLNIANEDCIKVAAVLNNAFYLENLHFTIEGKDTHYFIKTTTPESDLGTLRLTSGRKALENGINVTVSQSTTVVNGRTRRFADVEMQFGALALHVRYGMTLDEEKARILEQARQRALARAWAREQQRVRDGEEGARLWTEGEKRQLLSAGKVQGYDGYYVLSVEQYPELADSANNIQFLRQSEIGRR

SEQ ID NO: 531 - DNA, 2519 bp, Homo sapiens; identical to SEQ ID NO: 491
  CDS (7)..(2487)

SEQ ID NO: 532 - protein, 827 aa, Homo sapiens
NWQLQQTENDAFENGKVNSDTMPTNTVSLPSGDNGKLGGFTQENNTIDSGELDIGRRAIQEIPPGIFWRSQLFIDQPQFLKFNISLQKDALIGVYGRKGLPPSHTQYDFVELLDGSRLIAREQRSLLETERAGRQARSVSLHEAGFIQYLDSGIWHLAFYNDGKNAEQVSFNTIVIESVVECPRNCHGNGECVSGTCHCFPGFLGPDCSRAACPVLCSGNGQYSKGRCLCFSGWKGTECDVPTTQCIDPQCGGRGICIMGSCACNSGYKGESCEEADCIDPGCSNHGVCIHGECHCSPGWGGSNCEILKTMCPDQCSGHGTYLQESGSCTCDPNWTGPDCSNEICSVDCGSHGVCMGGTCRCEEGWTGPACNQRACHPRCAEHGTCKDGKCECSQGWNGEHCTIAHYLDKIVKDKIGYKEGCPGLCNSNGRCTLDQNGWHCACQPGWRGAGCDVAMETLCTDSKDNEGDGLIDCMDPDCCLQSSCQNQPYCRGLPDPQGIISQSLQSPSQQAAKSFYDRISFLIGSDSTHVIPGESPFNKSLASVIRGQVLTADGTPLIGVNVSFFHYPEYGYTITRQDGMFDLVANGGASLTLVFERSPFLTQYHTVWIPWNVFYVMDTLVMKKEENDIPSCDLSGFVRPNPIIVSSPLSTFFRSSPEDSPIIPETQVLHEETTIPGTDLKLSYLSSRAAGYKSVLKITMTQSIIPFNLMKVHLMVAVVGRLFQKWFPASPNLAYTFIWDKTDAYNQKVYGLSEAVVSVGYEYESCLDLTLWEKRTAILQGYELDASNMGGWTLDKHHVLDVQNGILYKGNGENQFISQQPPVVSS

SEQ ID NO: 533 - DNA, 2482 bp, Homo sapiens; identical to SEQ ID NO: 519
  CDS (11)..(2473)

SEQ ID NO: 534 - protein, 821 aa, Homo sapiens; identical to SEQ ID NO: 518

SEQ ID NO: 535 - DNA, 2500 bp, Homo sapiens; identical to SEQ ID NO: 495
  CDS (11)..(2491)

SEQ ID NO: 536 - protein, 827 aa, Homo sapiens; identical to SEQ ID NO: 532

SEQ ID NO: 537 - DNA, 2541 bp, Homo sapiens
  CDS (16)..(2529)
caccgcggccgcaccatgctgcccggtttggcactgctcctgctggccgcctggacggctcgggcgaactggcagctacagcagactgaaaatgacacatttgagaatggaaaagtgaattctgataccatgccaacaaacactgtgtcattaccttctggagacaatggaaaattaggtggatttacgcaagaaaataacaccatagattccggagaacttgatattggccgaagagcaattcaagagattcctcccgggatcttctggagatcacagctcttcattgatcagccacagtttcttaaattcaatatctctcttcagaaggatgcattgattggagtatatggccggaaaggcttaccgccttcccatactcagtatgacttcgtggagctcctggatggcagcaggctgattgccagagagcagcggagcctgcttgagacggagagagccgggcggcaggcgagatccgtcagccttcatgaggccggctctatccagtacttggattctggaatctggcatctggctttttataatgatgggaaaaatgcagagcaggtgtcttttaataccattgttatagagtctgtggtggaatgtccccgaaattgccatggaaatggagaatgcgtttctggaacttgccattgttttccaggatttctgggtccggattgttcaagagccgcctgtccagtgttatgtagtggcaacgggcagtactccaagggccgctgcctgtgtttcagcggctggaagggcaccgagtgtgatgtgccgactacccagtgtattgacccacagtgtgggggtcgtgggatttgtatcatgggctcttgtgcttgcaactcaggatacaaaggagaaagttgtgaagaagctgactgtatagaccctgggtgttctaatcatggtgtgtgtatccacggggaatgtcactgcagtccaggatggggaggtagcaattgtgaaatactgaagaccatgtgtccagaccagtgctccggccacggaacgtatcttcaagaaagtggctcctgcacgtgtgaccctaactggactggcccagactgctcaaacgaaatatgttctgtggactgtggctcacacggcgtttgcatgggggggacgtgtcgctgtgaagaaggctggacgggcccagcctgtaatcagagagcctgccacccccgctgtgccgagcacgggacctgcaaggatggcaagtgtgaatgcagccagggctggaatggagagcactgcactatcgctcactatttggataagatagttaaagagggttgtcctggtctgtgcaacagcaatggaagatgtaccctggaccaaaatggctggcattgtgtgtgccagcctggatggagaggagcaggctgtgacgtagccatggagactctttgcacagatagtaaggacaatgaaggagatggactcattgactgcatggatcccgattgctgcctacagagttcctgccagaatcagccctattgtcggggactgccggatcctcaggacatcattagccaaagccttcaatcgccttctcagcaagctgccaaatccttttatgatcgaatcagtttccttataggatctgatagcacccatgttatacctggagaaagtcctttcaataagagccttgcatctgtcatcagaggccaagtactgactgctgatggaactccacttattggagtaaatgtctcgtttttccattacccagaatatggatatactattacccgccaggacggaatgtttgacttggtggcaaatggtggggcctctctaactttggtatttgaacgatccccattcctcactcagtatcatactgtgtggattccatggaatgtcttttatgtgatggataccctagtcatgaagaaagaagagaatgacattcccagctgtgatctgagtggattcgtgaggccaaatcccatcattgtgtcatcacctttatccacctttttcagatcttctcctgaagacagtcccatcattcccgaaacacaggtactccacgaggaaactacaattccaggaacagatttgaaactctcctacttgagttccagagctgcagggtataagtcagttctcaagatcaccatgacccagtctattattccatttaatttaatgaaggttcatcttatggtagctgtagtaggaagactcttccaaaagtggtttcctgcctcaccaaacttggcctatactttcatatgggataaaacagatgcatataatcagaaagtctatggtctatctgaagctgttgtgtcagttggatatgagtatgagtcgtgtttggacctgactctgtgggaaaagaggactgccattctgcagggctatgaattggatgcgtccaacatgggtggctggacattagataaacatcacgtgctggatgtacagaacggtatactgtacaagggaaacggggaaaaccagttcatctcccagcagcctccagtcgtgagtagctaggtcgacggc

SEQ ID NO: 538 - protein, 838 aa, Homo sapiens
MLPGLALLLLAAWTARANWQLQQTENDTFENGKVNSDTMPTNTVSLPSGDNGKLGGFTQENNTIDSGELDIGRRAIQEIPPGIFWRSQLFIDQPQFLKFNISLQKDALIGVYGRKGLPPSHTQYDFVELLDGSRLIAREQRSLLETERAGRQARSVSLHEAGSIQYLDSGIWHLAFYNDGKNAEQVSFNTIVIESVVECPRNCHGNGECVSGTCHCFPGFLGPDCSRAACPVLCSGNGQYSKGRCLCFSGWKGTECDVPTTQCIDPQCGGRGICIMGSCACNSGYKGESCEEADCIDPGCSNHGVCIHGECHCSPGWGGSNCEILKTMCPDQCSGHGTYLQESGSCTCDPNWTGPDCSNEICSVDCGSHGVCMGGTCRCEEGWTGPACNQRACHPRCAEHGTCKDGKCECSQGWNGEHCTIAHYLDKIVKEGCPGLCNSNGRCTLDQNGWHCVCQPGWRGAGCDVAMETLCTDSKDNEGDGLIDCMDPDCCLQSSCQNQPYCRGLPDPQDIISQSLQSPSQQAAKSFYDRISFLIGSDSTHVIPGESPFNKSLASVIRGQVLTADGTPLIGVNVSFFHYPEYGYTITRQDGMFDLVANGGASLTLVFERSPFLTQYHTVWIPWNVFYVMDTLVMKKEENDIPSCDLSGFVRPNPIIVSSPLSTFFRSSPEDSPIIPETQVLHEETTIPGTDLKLSYLSSRAAGYKSVLKITMTQSIIPFNLMKVHLMVAVVGRLFQKWFPASPNLAYTFIWDKTDAYNQKVYGLSEAVVSVGYEYESCLDLTLWEKRTAILQGYELDASNMGGWTLDKHHVLDVQNGILYKGNGENQFISQQPPVVSS

SEQ ID NO: 539 - DNA, 1755 bp, Homo sapiens
  CDS (890)..(1531)
gagaaaggagattaaaaataacctctggatattcctctcatgtgatctttattctggatgaagcattaggacagctaatagccgtgtgtcactgtgtgatttcttccctaagactaaggacccatcattttagtgcaaccttcttcatttaaatggagagttgtaattgccaatgctcacagctactcctgctccggcaatttgctgccagaagtgtgttttcctttttaaaaggcagtaaattcaagatgttgtggtggatgtagatttttgctgcaaggaaataacagctggtgatggaatttcattcttttgacttctagattgcctgtgaagagctgcttcctcggaagagcaccctaaggctgggtggccactatcctttgccttggcagagccagccagaaggcctaggcacaacccgctgtgtttgctgacagccaacctaccctggagttccggagcggcttcctaggaagactggggagcggtagaaaaatggctctgctgagatgagctcttaattaatgcactgagagcctgcaagtcccacctctcaacaggaatgattgacgtccaaggatacataaattacactaactgagctctgcctctatataagctttccacatccaactcatcagagaagctaggcttgtaccataaccaatacccctgcttggcaactctaatgagcaaactgccgcaaaattgagagagaacacacctttttgatttcctgctcttctaagacacagtgatttagaatttctgttcaagcaagagaactaaagacttctttaaagaagagaagagaggccaatgagacttgaaccctgagcctaagttgtcaccagcaggactgatgtgcacacagaaggaatgaagtatggatgtgaaagaacgcaggccttactgctccctgaccaagagcagacgagagaaggaacggcgctacacaaattcctccgcagacaatgaggagtgccgggtacccacacacaactcctacagttccagcgagacattgaaagcttttgatcatgattcctcgcggctgctttacggcaacagagtgaaggatttggttcacagagaagcagacgagttcactagacaaggacagaattttaccctaaggcagttaggagtttgtgaaccagcaactcgaagaggactggcattttgtgcggaaatggggctccctcacagaggttactctatcagtgcagggtcagatgctgatactgaaaatgaagcagtgatgtccccagagcatgccatgagactttggggcagggggttcaaatcaggccgcagctcctgcctgtcaagtcggtccaactcagccctcaccctgacagatacggagcacgaaaacaagtccgacagtgagaatggagggtcaagcagttggttcggttttcattggaatttttatgtgagtaaagcttcctgtttgctgcgcttgcctaggattttcttatcccacaactacaatgtgaacaaagagatgagagagaaattatgctaatgcattttggtggatcaaatgagtgtttcatgagacaactcaaatttttgttagctatatggtgttggaatataatttcaaagacaactaagccctaaaataggagatttatttaaaacataacttttccttgaatgaaaggatgtttttgttctttctctgacaaatatgatttgagaataaaagacctgcccgggcagccgctcgagccctatagtgag

SEQ ID NO: 540 - protein, 214 aa, Homo sapiens
MDVKERRPYCSLTKSRREKERRYTNSSADNEECRVPTHNSYSSSETLKAFDHDSSRLLYGNRVKDLVHREADEFTRQGQNFTLRQLGVCEPATRRGLAFCAEMGLPHRGYSISAGSDADTENEAVMSPEHAMRLWGRGFKSGRSSCLSSRSNSALTLTDTEHENKSDSENGGSSSWFGFHWNFYVSKASCLLRLPRIFLSHNYNVNKEMREKLC

SEQ ID NO: 541 - DNA, 768 bp, Homo sapiens
  CDS (65)..(706)
agacttgaaccctgagcctaagttgtcaccagcaggactgatgtgcacacagaaggaatgaagtatggatgtgaaagaacgcaggccttactgctccctgaccaagagcagacgagagaaggaacggcgctacacaaattcctccgcagacaatgaggagtgccgggtacccacacagaagtcctacagttccagcgagacattgaaagcttttgatcatgattcctcgcggctgctttacggcaacagagtgaaggatttggttcacagagaagcagacgagttcactagacaaggacagaattttaccctaaggcagttaggagtttgtgaaccagcaactcgaagaggactggcattttgtgcggaaatggggctccctcacagaggttactctatcagtgcagggtcagatgctgatactgaaaatgaagcagtgatgtccccagagcatgccatgagactttggggcaggggggtcaaatcaggccgcagctcctgcctgtcaagtcggtccaactcagccctcaccctgacagatacggagcacgaaaacaagtccgacagtgagaatggagggtcaagcagttggttcggttttcattggaatttttatgtgggtaaagcttcctgtttgctgcgcttgcctaggattttcttatcccacaactacaatgtgaacaaagagatgagagagaaattatgctaatgcattttggtggatcaatgctaatgcattttggtggatcaatgctaatgcattttggt

SEQ ID NO: 542 - protein, 214 aa, Homo sapiens
MDVKERRPYCSLTKSRREKERRYTNSSADNEECRVPTQKSYSSSETLKAFDHDSSRLLYGNRVKDLVHREADEFTRQGQNFTLRQLGVCEPATRRGLAFCAEMGLPHRGYSISAGSDADTENEAVMSPEHAMRLWGRGVKSGRSSCLSSRSNSALTLTDTEHENKSDSENGGSSSWFGFHWNFYVGKASCLLRLPRIFLSHNYNVNKEMREKLC

SEQ ID NO: 543 - DNA, 8657 bp, Homo sapiens
  CDS (151)..(8325)
tttggcctcgggccagaattcggcacgaggggtctggagcttggaggagaagtctgaactaaggataaactaaagagaggccaatgagacttgaaccctgagcctaagttgtcaccagcaggactgatgtgcacacagaaggaatgaagtatggatgtgaaagaacgcaggccttactgctccctgaccaagagcagacgagagaaggaacggcgctacacaaattcctccgcagacaatgaggagtgccgggtacccacacagaagtcctacagttccagcgagacattgaaagcttttgatcatgattcctcgcggctgctttacggcaacagagtgaaggatttggttcacagagaagcagacgagttcactagacaaggacagaattttaccctaaggcagttaggagtttgtgaaccagcaactcgaagaggactggcattttgtgcggaaatggggcttcctcacagaggttactctatcagtgcagggtcagatgctgatactgaaaatgaagcagtgatgtccccagagcatgccatgagactttggggcaggggggtcaaatcaggccgcagctcctgcctgtcaagtcggtccaactcagccctcaccctgacagatacggagcacgaaaacaagtccgacagtgagaatgagcaacctgcaagcaatcaaggccagtctaccctgcagcccttgccgccttcccataagcagcactctgcacagcatcatccatccatcacttctctcaacagaaactccctgaccaatagaaggaaccagagtccggccccgccggctgctttgcccgccgagctgcaaaccacacccgagtccgtccagctgcaggacagctgggtccttggcagtaatgtaccactggaaagcaggcatttcctattcaaaacaggaacaggtacaacgccactgttcagtactgcaaccccaggatacacaatggcatctggctctgtttattcaccacctactcggccactacctagaaacaccctatcaagaagtgcttttaaattcaagaagtcttcaaagtactgtagctggaaatgcactgcactgtgtgccgtaggggtctcggtgctcctggcaatactcctgtcttattttatagcaatgcatctctttggcctcaactggcagctacagcagactgaaaatgacacatttgagaatggaaaagtgaattctgataccatgccaacaaacactgtgtcattaccttctggagacaatggaaaattaggtggatttacgcaagaaaataacaccatagattccggagaacttgatattggccgaagagcaattcaagagattcctcccgggatcttctggagatcacagctcttcattgatcagccacagtttcttaaattcaatatctctcttcagaaggatgcattgattggagtatatggccggaagaagttaccgccttcccatactcagtcctccccccagtatgacttcgtggagctcctggatggcagcaggctgattgccagagagcagcggagcctgcttgagacggagagagccgggcggcaggcgagatccgtcagccttcatgaggccggctttatccagtacttggattctggaatctggcatctggctttttataatgatgggaaaaatgcagagcaggtgtcttttaataccattgttatagagtctgtggtggaatgtccccgaaattgccatggaaatggagaatgcgtttctggaacttgccattgttttccaggatttctgggtccggattgttcaagagccgcctgtccagtgttatgtagtggcaacgggcagtactccaagggccgctgcctgtgtttcagcggctggaagggcaccgagtgtgatgtgccgactacccagtgtattgacccacagtgtgggggtcgtgggatttgtatcatgggctcctgtgcttgcagctcaggatacaaaggagaaagttgtgaagaagctgactgtatagaccctgggtgttctaatcatggtgtgtgtatccacggggaatgtcactgcagtccaggatggggaggtagcaattgtgaaatactgaagaccatgtgtccagaccagtgctccggccacggaacgtatcttcaagaaagtggctcctgcacgtgtgaccctaactggactggcccagactgctcaaacgaaatatgttctgtggactgtggctcacacggcgtttgcatgggggggacgtgtcgctgtgaagaaggctggacgggcccagcctgtaatcagagagcctgccacccccgctgtgccgagcacgggacctgcaaggatggcaagtgtgaatgcagccagggctggaatggagagcactgcactatcgctcactatttggataagatagttaaagacaagataggatataaagagggttgtcctggtctgtgcaacagcaatggaagatgtaccctggaccaaaatggcggacattgtgtgtgccagcctggatggagaggagcaggctgtgacgtagccatggagactctttgcacagatagcaaggacaatgaaggggatggactcattgactgcatggatcccgattgctgcctacagagttcctgccagaatcagccctattgtcggggactgccggatcctcaggacatcattagccaaagccttcaatcgccttctcagcaagctgccaaatccttttatgatcgaatcagtttccttataggatctgatagcacccatgttatacctggagaaagtcctttcaataagagccttgcatctgtcatcagaggccaagtactgactgctgatggaactccacttattggagtaaatgtctcgtttttccattacccagaatatggatatactattacccgccaggacggaatgtttgacttggtggcaaatggtggggcctctctaactttggtatttgaacgatccccattcctcactcagtatcatactgtgtggattccatggaatgtcttttatgtgatggataccctagtcatggagaaagaagagaatgacattcccagctgtgatctgagtggattcgtgaggccaaatcccatcattgtgtcatcacctttatccacctttttcagatcttctcctgaagacagtcccatcattcccgaaacacaggtactccacgaggaaactacaattccaggaacagatttgaaactctcctacttgagttccagagctgcagggtataagtcagttctcaagatcaccatgacccagtctattattccatttaatttaatgaaggttcatcttatggtagctgtagtaggaagactcttccaaaagtggtttcctgcctcaccaaacttggcctatactttcatatgggataaaacagatgcatataatcagaaagtctatggtctatctgaagctgttgtgtcagttggatatgagtatgagtcgtgtttggacctgactctgtgggaaaagaggactgccattctgcagggctatgaattggatgcgtccaacatgggtggctggacattagataaacatcacgtgctggatgtacagaacggtatactgtacaagggaaacggggaaaaccagttcatctcccagcagcctccagtcgtgagtagcatcatgggcaatgggcgaaggcgcagcatttcctgccccagttgcaatggtcaagctgatggtaacaagttactggccccagtggcgctagcttgtgggatcgatggcagtctgtacgtaggcgatttcaactacgtgcggcggatattcccttctggaaatgtaacaagtgtcttagaactaagaaataaagattttagacatagcagcaacccagctcatagatactaccttgcaacggatccagtcacgggagatctgtacgtttctgacacaaacacccgcagaatttatcgcccaaagtcacttacgggggcaaaagacttgactaaaaatgcagaagtcgtcgcagggacaggggagcaatgccttccgtttgacgaggcgagatgtggggatggagggaaggccgtggaagccacactcatgagtcccaaaggaatggcagttgataagaatggattaatctactttgttgatggaaccatgattaggaaagttgaccaaaatggaatcatatcaactcttctgggctctaacgatttgacttcagccagacctttaacttgtgacaccagcatgcacatcagccaggtacgtctggaatggcccactgacctagccattaaccctatggataactccatttatgtcctggataataatgtagttttacagatcactgaaaatcgtcaagttcgcattgctgctggacggcccatgcactgtcaggttcccggagtggaatatcctgtggggaagcacgcggtgcagacaacactggaatcagccactgccattgctgtgtcctacagtggggtcctgtacattactgaaactgatgagaagaaaattaaccggataaggcaggtcacaacagatggagaaatctccttagtggccggaataccttcagagtgtgactgcaaaaatgatgccaactgtgactgttaccagagtggagatggctacgccaaggatgccaaactcagtgccccatcctccctggctgcttctccagatggtacactgtatattgcagatctagggaatatccggatccgggctgtgtcaaagaataagcctttacttaactctatgaacttctatgaagttgcgtctccaactgatcaagaactctacatctttgacatcaatggtactcaccaatatactgtaagtttagtcactggtgattacctttacaattttagctacagcaatgacaatgatattactgctgtgacagacagcaatggcaacacccttagaattagacgggacccaaatcgcatgccagttcgagtggtgtctcctgataaccaagtgatatggttgacaataggaacaaatggatgtttgaaaggcatgactgctcaaggactggaattagttttgtttacttaccatggcaatagtggccttttagccactaaaagtgatgaaactggatggacaacgttttttgactatgacagtgaaggtcgtctgacaaatgttacgtttccaactggagtggtcacaaacctgcatggggacatggacaaggctatcacagtggacattgagtcatctagccgagaagaagatgtcagcatcacttcaaatctgtcctcgatcgattctttctacaccatggttcaagatcagttaagaaacagctaccagattggttatgacggctccctcagaattatctacgccagtggcctggactcacactaccaaacagagccgcacgttctggctggcaccgctaatccgacggttgccaaaagaaacatgactttgcctggcgagaacggtcaaaacttggtggaatggagattccgaaaagagcaagcccaagggaaagtcaatgtctttggccgcaagctcagggttaatggcagaaacctcctttcagttgactttgatcgaacaacaaagacagaaaagatctatgacgaccaccgtaaatttctactgaggatcgcctacgacacgtctgggcacccgactctctggctgccaagcagcaagctgatggccgtcaatgtcacctattcatccacaggtcaaattgccagcatccagcgaggcaccactagcgagaaagtagattatgacggacaggggaggatcgtgtctcgggtctttgctgatggtaaaacatggagttacacatatttagaaaagtccatggttcttctgcttcatagccagcggcagtacatcttcgaatacgatatgtgggaccgcctgtctgccatcaccatgcccagtgtggctcgccacaccatgcagaccatccgatccattggctactaccgcaacatatacaaccccccggaaagcaacgcctccatcatcacggactacaacgaggaagggctgcttctacaaacagctttcttgggtacaagtcggagggtcttattcaaatacagaaggcagactaggctctcagaaattttatatgatagcacaagagtcagttttacctatgatgaaacagcaggagtcctaaagacagtaaacctccagagtgatggttttatttgcaccattagatacaggcaaattggtcccctgattgacaggcagattttccgctttagtgaagatgggatggtaaatgcaagatttgactatagctatgacaacagctttcgagtgaccagcatgcagggtgtgatcaatgaaacgccactgcctattgatctgtatcagtttgatgacatttctggcaaagttgagcagtttggaaagtttggagttatatattatgatattaaccagatcatttctacagctgtaatgacctatacgaagcactttgatgctcatggccgtatcaaggagattcaatatgagatattcaggtcgctcatgtactggattacaattcagtatgataacatgggtcgggtaaccaagagagagattaaaatagggccctttgccaacaccaccaaatatgcttatgaatatgatgttgatggacagctccaaacagtttacctcaatgaaaagataatgtggcggtacaactacgatctgaatggaaacctccatttactgaacccaagtaacagtgcgcgtctgacaccccttcgctatgacctgcgagacagaatcactcgactgggtgatgttcaatatcggttggatgaagatggtttcctacgtcaaaggggcacggaaatctttgaatatagctccaaggggcttctaactcgagtttacagtaaaggcagtggctggacagtgatctaccgttatgacggcctgggaaggcgtgtttctagcaaaaccagtctaggacagcacctgcagtttttttatgctgacttaacttatcccactaggattactcatgtctacaaccattcgagttcagaaattacctccctgtattatgatctccaaggacatctttttgccatggaaatcagcagtggggatgaattctatattgcatcggataacacagggacaccactggctgtgttcagtagcaatgggcttatgctgaaacagattcagtacactgcatatggggaaatctattttgactctaatattgactttcaactggtaattggatttcatggtggcctgtatgacccactcaccaaattaatccactttggagaaagagattatgacattttggcaggacggtggacaacacctgacatagaaatctggaaaagaattgggaaggacccagctccttttaacttgtacatgtttaggaataacaaccctgcaagcaaaatccatgacgtgaaagattacatcacagatgttaacagctggctggtgacatttggtttccatctgcacaatgctattcctggattccctgttcccaaatttgatttaacagaaccttcttacgaacttgtgaagagtcagcagtgggatgatataccgcccatcttcggagtccagcagcaagtggcgcggcaggccaaggccttcctgtcgctggggaagatggccgaggtgcaggtgagccggcgccgggccggcggcgcgcagtcctggctgtggttcgccacggtcaagtcgctgatcggcaagggcgtcatgctggccgtcagccagggccgcgtgcagaccaacgtgctcaacatcgccaacgaggactgcatcaaggtggcggccgtgctcaacaacgccttctacctggagaacctgcacttcaccatcgagggcaaggacacgcactacttcatcaagaccaccacgcccgagagcgacctgggcacgctgcggttgaccagcggccgcaaggcgctggagaacggcatcaacgtgacggtgtcgcagtccaccacggtggtgaacggcaggacgcgcaggttcgcggacgtggagatgcagttcggcgcgctggcgctgcacgtgcgctacggcatgaccctggacgaggagaaggcgcgcatcctggagcaggcgcggcagcgcgcgctcgcccgggcctgggcgcgcgagcagcagcgcgtgcgcgacggcgaggagggcgcgcgcctctggacggagggcgagaagcggcagctgctgagcgccggcaaggtgcagggctacgacgggtactacgtactctcggtggagcagtaccccgagctggccgacagcgccaacaacatccagttcctgcggcagagcgagatcggcaggaggtaacgcccgggccgcgcccgccgagccgctcacgccctgcccacattgtcctgtggcacaacccgagtgggactctccaacgcccaagagccttcctcccgggggaatgagactgctgttacgacccacacccacaccgcgaaaacaaggaccgcttttttccgaatgaccttaaaggtgatcggctttaacgaatatgtttacatatgcatagcgctgcactcagtcggactgaacgtagccagaggaaaaaaaaatcatcaaggacaaaggcctcgacctgttgcgctgggccgtctgttccttctaggcactgtatttaactaacttta

SEQ ID NO: 544 - protein, 2725 aa, Homo sapiens; identical to SEQ ID NO: 486

SEQ ID NO: 545 - DNA, 8657 bp, Homo sapiens
  CDS (151)..(8325)
tttggcctcgggccagaattcggcacgaggggtctggagcttggaggagaagtctgaactaaggataaactaaagagaggccaatgagacttgaaccctgagcctaagttgtcaccagcaggactgatgtgcacacagaaggaatgaagtatggatgtgaaagaacgcaggccttactgctccctgaccaagagcagacgagagaaggaacggcgctacacaaattcctccgcagacaatgaggagtgccgggtacccacacagaagtcctacagttccagcgagacattgaaagcttttgatcatgattcctcgcggctgctttacggcaacagagtgaaggatttggttcacagagaagcagacgagttcactagacaaggacagaattttaccctaaggcagttaggagtttgtgaaccagcaactcgaagaggactggcattttgtgcggaaatggggctccctcacagaggttactctatcagtgcagggtcagatgctgatactgaaaatgaagcagtgatgtccccagagcatgccatgagactttggggcaggggggtcaaatcaggccgcagctcctgcctgtcaagtcggtccaactcagccctcaccctgacagatacggagcacgaaaacaagtccgacagtgagaatgagcaacctgcaagcaatcaaggccagtctaccctgcagcccttgccgccttcccataagcagcactctgcacagcatcatccatccatcacttctctcaacagaaactccctgaccaatagaaggaaccagagtccggccccgccggctgctttgcccgccgagctgcaaaccacacccgagtccgtccagctgcaggacagctgggtccttggcagtaatgtaccactggaaagcaggcatttcctattcaaaacaggaacaggtacaacgccactgttcagtactgcaaccccaggatacacaatggcacctggctctgtttattcaccacctactcggccactacctagaaacaccctatcaagaagtgcttttaaattcaagaagtcttcaaagtactgtagctggaaatgcactgcactgtgtgccgtaggggtctcggtgctcctggcaatactcctgtcttattttatagcaatgcatctctttggcctcaactggcagctacagcagactgaaaatgacacatttgagaatggaaaagtgaattctgataccatgccaacaaacactgtgtcattaccttctggagacaatggaaaattaggtggatttacgcaagaaaataacaccatagattccggagaacttgatattggccgaagagcaattcaagagattcctcccgggatcttctggagatcacagctcttcattgatcagccacagtttcttaaattcaatatctctcttcagaaggatgcattgattggagtatatggccggaagaagttaccgccttcccatactcagtcctccccccagtatgacttcgtggagctcctggatggcagcaggctgattgccagagagcagcggagcctgcttgagacggagagagccgggcggcaggcgagatccgtcagccttcatgaggccggctttatccagtacttggattctggaatctggcatctggctttttataatgatgggaaaaatgcagagcaggtgtcttttaataccattgttatagagtctgtggtggaatgtccccgaaattgccatggaaatggagaatgcgtttctggaacttgccattgttttccaggatttctgggtccggattgttcaagagccgcctgtccagtgttatgtagtggcaacgggcagtactccaagggccgctgcctgtgtttcagcggctggaagggcaccgagtgtgatgtgccgactacccagtgtattgacccacagtgtgggggtcgtgggatttgtatcatgggctcctgtgcttgcagctcaggatacaaaggagaaagttgtgaagaagctgactgtatagaccctgggtgttctaatcatggtgtgtgtatccacggggaatgtcactgcagtccaggatggggaggtagcaattgtgaaatactgaagaccatgtgtccagaccagtgctccggccacggaacgtatcttcaagaaagtggctcctgcacgtgtgaccctaactggactggcccagactgctcaaacgaaatatgttctgtggactgtggctcacacggcgtttgcatgggggggacgtgtcgctgtgaagaaggctggacgggcccagcctgtaatcagagagcctgccacccccgctgtgccgagcacgggacctgcaaggatggcaagtgtgaatgcagccagggctggaatggagagcactgcactatcgctcactatttggataagatagttaaagacaagataggatataaagagggttgtcctggtctgtgcaacagcaatggaagatgtaccctggaccaaaatggcggacattgtgtgtgccagcctggatggagaggagcaggctgtgacgtagccatggagactctttgcacagatagcaaggacaatgaaggggatggactcattgactgcatggatcccgattgctgcctacagagttcctgccagaatcagccctattgtcggggactgccggatcctcaggacatcattagccaaagccttcaatcgccttctcagcaagctgccaaatccttttatgatcgaatcagtttccttataggatctgatagcacccatgttatacctggagaaagtcctttcaataagagccttgcatctgtcatcagaggccaagtactgactgctgatggaactccacttattggagtaaatgtctcgtttttccattacccagaatatggatatactattacccgccaggacggaatgtttgacttggtggcaaatggtggggcctctctaactttggtatttgaacgatccccattcctcactcagtatcatactgtgtggattccatggaatgtcttttatgtgatggataccctagtcatggagaaagaagagaatgacattcccagctgtgatctgagtggattcgtgaggccaaatcccatcattgtgtcatcacctttatccacctttttcagatcttctcctgaagacagtcccatcattcccgaaacacaggtactccacgaggaaactacaattccaggaacagatttgaaactctcctacttgagttccagagctgcagggtataagtcagttctcaagatcaccatgacccagtctattattccatttaatttaatgaaggttcatcttatggtagctgtagtaggaagactcttccaaaagtggtttcctgcctcaccaaacttggcctatactttcatatgggataaaacagatgcatataatcagaaagtctatggtctatctgaagctgttgtgtcagttggatatgagtatgagtcgtgtttggacctgactctgtgggaaaagaggactgccattctgcagggctatgaattggatgcgtccaacatgggtggctggacattagataaacatcacgtgctggatgtacagaacggtatactgtacaagggaaacggggaaaaccagttcatctcccagcagcctccagtcgtgagtagcatcatgggcaatgggcgaaggcgcagcatttcctgccccagttgcaatggtcaagctgatggtaacaagttactggccccagtggcgctagcttgtgggatcgatggcagtctgtacgtaggcgatttcaactacgtgcggcggatattcccttctggaaatgtaacaagtgtcttagaactaagaaataaagattttagacatagcagcaacccagctcatagatactaccttgcaacggatccagtcacgggagatctgtacgtttctgacacaaacacccgcagaatttatcgcccaaagtcacttacgggggcaaaagacttgactaaaaatgcagaagtcgtcgcagggacaggggagcaatgccttccgtttgacgaggcgagatgtggggatggagggaaggccgtggaagccacactcatgagtcccaaaggaatggcagttgataagaatggattaatctactttgttgatggaaccatgattaggaaagttgaccaaaatggaatcatatcaactcttctgggctctaacgatttgacttcagccagacctttaacttgtgacaccagcatgcacatcagccaggtacgtctggaatggcccactgacctagccattaaccctatggataactccatttatgtcctggataataatgtagttttacagatcactgaaaatcgtcaagttcgcattgctgctggacggcccatgcactgtcaggttcccggagtggaatatcctgtggggaagcacgcggtgcagacaacactggaatcagccactgccattgctgtgtcctacagtggggtcctgtacattactgaaactgatgagaagaaaattaaccggataaggcaggtcacaacagatggagaaatctccttagtggccggaataccttcagagtgtgactgcaaaaatgatgccaactgtgactgttaccagagtggagatggctacgccaaggatgccaaactcagtgccccatcctccctggctgcttctccagatggtacactgtatattgcagatctagggaatatccggatccgggctgtgtcaaagaataagcctttacttaactctatgaacttctatgaagttgcgtctccaactgatcaagaactctacatctttgacatcaatggtactcaccaatatactgtaagtttagtcactggtgattacctttacaattttagctacagcaatgacaatgatattactgctgtgacagacagcaatggcaacacccttagaattagacgggacccaaatcgcatgccagttcgagtggtgtctcctgataaccaagtgatatggttgacaataggaacaaatggatgtttgaaaggcatgactgctcaaggactggaattagttttgtttacttaccatggcaatagtggccttttagccactaaaagtgatgaaactggatggacaacgttttttgactatgacagtgaaggtcgtctgacaaatgttacgtttccaactggagtggtcacaaacctgcatggggacatggacaaggctatcacagtggacattgagtcatctagccgagaagaagatgtcagcatcacttcaaatctgtcctcgatcgattctttctacaccatggttcaagatcagttaagaaacagctaccagattggttatgacggctccctcagaattatctacgccagtggcctggactcacactaccaaacagagccgcacgttctggctggcaccgctaatccgacggttgccaaaagaaacatgactttgcctggcgagaacggtcaaaacttggtggaatggagattccgaaaagagcaagcccaagggaaagtcaatgtctttggccgcaagctcagggttaatggcagaaacctcctttcagttgactttgatcgaacaacaaagacagaaaagatctatgacgaccaccgtaaatttctactgaggatcgcctacgacacgtctgggcacccgactctctggctgccaagcagcaagctgatggccgtcaatgtcacctattcatccacaggtcaaattgccagcatccagcgaggcaccactagcgagaaagtagattatgacggacaggggaggatcgtgtctcgggtctttgctgatggtaaaacatggagttacacatatttagaaaagtccatggttcttctgcttcatagccagcggcagtacatcttcgaatacgatatgtgggaccgcctgtctgccatcaccatgcccagtgtggctcgccacaccatgcagaccatccgatccattggctactaccgcaacatatacaaccccccggaaagcaacgcctccatcatcacggactacaacgaggaagggctgcttctacaaacagctttcttgggtacaagtcggagggtcttattcaaatacagaaggcagactaggctctcagaaattttatatgatagcacaagagtcagttttacctatgatgaaacagcaggagtcctaaagacagtaaacctccagagtgatggttttatttgcaccattagatacaggcaaattggtcccctgattgacaggcagattttccgctttagtgaagatgggatggtaaatgcaagatttgactatagctatgacaacagctttcgagtgaccagcatgcagggtgtgatcaatgaaacgccactgcctattgatctgtatcagtttgatgacatttctggcaaagttgagcagtttggaaagtttggagttatatattatgatattaaccagatcatttctacagctgtaatgacctatacgaagcactttgatgctcatggccgtatcaaggagattcaatatgagatattcaggtcgctcatgtactggattacaattcagtatgataacatgggtcgggtaaccaagagagagattaaaatagggccctttgccaacaccaccaaatatgcttatgaatatgatgttgatggacagctccaaacagtttacctcaatgaaaagataatgtggcggtacaactacgatctgaatggaaacctccatttactgaacccaagtaacagtgcgcgtctgacaccccttcgctatgacctgcgagacagaatcactcgactgggtgatgttcaatatcggttggatgaagatggtttcctacgtcaaaggggcacggaaatctttgaatatagctccaaggggcttctaactcgagtttacagtaaaggcagtggctggacagtgatctaccgttatgacggcctgggaaggcgtgtttctagcaaaaccagtctaggacagcacctgcagtttttttatgctgacttaacttatcccactaggattactcatgtctacaaccattcgagttcagaaattacctccctgtattatgatctccaaggacatctttttgccatggaaatcagcagtggggatgaattctatattgcatcggataacacagggacaccactggctgtgttcagtagcaatgggcttatgctgaaacagattcagtacactgcatatggggaaatctattttgactctaatattgactttcaactggtaattggatttcatggtggcctgtatgacccactcaccaaattaatccactttggagaaagagattatgacattttggcaggacggtggacaacacctgacatagaaatctggaaaagaattgggaaggacccagctccttttaacttgtacatgtttaggaataacaaccctgcaagcaaaatccatgacgtgaaagattacatcacagatgttaacagctggctggtgacatttggtttccatctgcacaatgctattcctggattccctgttcccaaatttgatttaacagaaccttcttacgaacttgtgaagagtcagcagtgggatgatataccgcccatcttcggagtccagcagcaagtggcgcggcaggccaaggccttcctgtcgctggggaagatggccgaggtgcaggtgagccggcgccgggccggcggcgcgcagtcctggctgtggttcgccacggtcaagtcgctgatcggcaagggcgtcatgctggccgtcagccagggccgcgtgcagaccaacgtgctcaacatcgccaacgaggactgcatcaaggtggcggccgtgctcaacaacgccttctacctggagaacctgcacttcaccatcgagggcaaggacacgcactacttcatcaagaccaccacgcccgagagcgacctgggcacgctgcggttgaccagcggccgcaaggcgctggagaacggcatcaacgtgacggtgtcgcagtccaccacggtggtgaacggcaggacgcgcaggttcgcggacgtggagatgcagttcggcgcgctggcgctgcacgtgcgctacggcatgaccctggacgaggagaaggcgcgcatcctggagcaggcgcggcagcgcgcgctcgcccgggcctgggcgcgcgagcagcagcgcgtgcgcgacggcgaggagggcgcgcgcctctggacggagggcgagaagcggcagctgctgagcgccggcaaggtgcagggctacgacgggtactacgtactctcggtggagcagtaccccgagctggccgacagcgccaacaacatccagttcctgcggcagagcgagatcggcaggaggtaacgcccgggccgcgcccgccgagccgctcacgccctgcccacattgtcctgtggcacaacccgagtgggactctccaacgcccaagagccttcctcccgggggaatgagactgctgttacgacccacacccacaccgcgaaaacaaggaccgcttttttccgaatgaccttaaaggtgatcggctttaacgaatatgtttacatatgcatagcgctgcactcagtcggactgaacgtagccagaggaaaaaaaaatcatcaaggacaaaggcctcgacctgttgcgctgggccgtctgttccttctaggcactgtatttaactaacttta

SEQ ID NO: 546 - protein, 2725 aa, Homo sapiens
MDVKERRPYCSLTKSRREKERRYTNSSADNEECRVPTQKSYSSSETLKAFDHDSSRLLYGNRVKDLVHREADEFTRQGQNFTLRQLGVCEPATRRGLAFCAEMGLPHRGYSISAGSDADTENEAVMSPEHAMRLWGRGVKSGRSSCLSSRSNSALTLTDTEHENKSDSENEQPASNQGQSTLQPLPPSHKQHSAQHHPSITSLNRNSLTNRRNQSPAPPAALPAELQTTPESVQLQDSWVLGSNVPLESRHFLFKTGTGTTPLFSTATPGYTMAPGSVYSPPTRPLPRNTLSRSAFKFKKSSKYCSWKCTALCAVGVSVLLAILLSYFIAMHLFGLNWQLQQTENDTFENGKVNSDTMPTNTVSLPSGDNGKLGGFTQENNTIDSGELDIGRRAIQEIPPGIFWRSQLFIDQPQFLKFNISLQKDALIGVYGRKKLPPSHTQSSPQYDFVELLDGSRLIAREQRSLLETERAGRQARSVSLHEAGFIQYLDSGIWHLAFYNDGKNAEQVSFNTIVIESVVECPRNCHGNGECVSGTCHCFPGFLGPDCSRAACPVLCSGNGQYSKGRCLCFSGWKGTECDVPTTQCIDPQCGGRGICIMGSCACSSGYKGESCEEADCIDPGCSNHGVCIHGECHCSPGWGGSNCEILKTMCPDQCSGHGTYLQESGSCTCDPNWTGPDCSNEICSVDCGSHGVCMGGTCRCEEGWTGPACNQRACHPRCAEHGTCKDGKCECSQGWNGEHCTIAHYLDKIVKDKIGYKEGCPGLCNSNGRCTLDQNGGHCVCQPGWRGAGCDVAMETLCTDSKDNEGDGLIDCMDPDCCLQSSCQNQPYCRGLPDPQDIISQSLQSPSQQAAKSFYDRISFLIGSDSTHVIPGESPFNKSLASVIRGQVLTADGTPLIGVNVSFFHYPEYGYTITRQDGMFDLVANGGASLTLVFERSPFLTQYHTVWIPWNVFYVMDTLVMEKEENDIPSCDLSGFVRPNPIIVSSPLSTFFRSSPEDSPIIPETQVLHEETTIPGTDLKLSYLSSRAAGYKSVLKITMTQSIIPFNLMKVHLMVAVVGRLFQKWFPASPNLAYTFIWDKTDAYNQKVYGLSEAVVSVGYEYESCLDLTLWEKRTAILQGYELDASNMGGWTLDKHHVLDVQNGILYKGNGENQFISQQPPVVSSIMGNGRRRSISCPSCNGQADGNKLLAPVALACGIDGSLYVGDFNYVRRIFPSGNVTSVLELRNKDFRHSSNPAHRYYLATDPVTGDLYVSDTNTRRIYRPKSLTGAKDLTKNAEVVAGTGEQCLPFDEARCGDGGKAVEATLMSPKGMAVDKNGLIYFVDGTMIRKVDQNGIISTLLGSNDLTSARPLTCDTSMHISQVRLEWPTDLAINPMDNSIYVLDNNVVLQITENRQVRIAAGRPMHCQVPGVEYPVGKHAVQTTLESATAIAVSYSGVLYITETDEKKINRIRQVTTDGEISLVAGIPSECDCKNDANCDCYQSGDGYAKDAKLSAPSSLAASPDGTLYIADLGNIRIRAVSKNKPLLNSMNFYEVASPTDQELYIFDINGTHQYTVSLVTGDYLYNFSYSNDNDITAVTDSNGNTLRIRRDPNRMPVRVVSPDNQVIWLTIGTNGCLKGMTAQGLELVLFTYHGNSGLLATKSDETGWTTFFDYDSEGRLTNVTFPTGVVTNLHGDMDKAITVDIESSSREEDVSITSNLSSIDSFYTMVQDQLRNSYQIGYDGSLRIIYASGLDSHYQTEPHVLAGTANPTVAKRNMTLPGENGQNLVEWRFRKEQAQGKVNVFGRKLRVNGRNLLSVDFDRTTKTEKIYDDHRKFLLRIAYDTSGHPTLWLPSSKLMAVNVTYSSTGQIASIQRGTTSEKVDYDGQGRIVSRVFADGKTWSYTYLEKSMVLLLHSQRQYIFEYDMWDRLSAITMPSVARHTMQTIRSIGYYRNIYNPPESNASIITDYNEEGLLLQTAFLGTSRRVLFKYRRQTRLSEILYDSTRVSFTYDETAGVLKTVNLQSDGFICTIRYRQIGPLIDRQIFRFSEDGMVNARFDYSYDNSFRVTSMQGVINETPLPIDLYQFDDISGKVEQFGKFGVIYYDINQIISTAVMTYTKHFDAHGRIKEIQYEIFRSLMYWITIQYDNMGRVTKREIKIGPFANTTKYAYEYDVDGQLQTVYLNEKIMWRYNYDLNGNLHLLNPSNSARLTPLRYDLRDRITRLGDVQYRLDEDGFLRQRGTEIFEYSSKGLLTRVYSKGSGWTVIYRYDGLGRRVSSKTSLGQHLQFFYADLTYPTRITHVYNHSSSEITSLYYDLQGHLFAMEISSGDEFYIASDNTGTPLAVFSSNGLMLKQIQYTAYGEIYFDSNIDFQLVIGFHGGLYDPLTKLIHFGERDYDILAGRWTTPDIEIWKRIGKDPAPFNLYMFRNNNPASKIHDVKDYITDVNSWLVTFGFHLHNAIPGFPVPKFDLTEPSYELVKSQQWDDIPPIFGVQQQVARQAKAFLSLGKMAEVQVSRRRAGGAQSWLWFATVKSLIGKGVMLAVSQGRVQTNVLNIANEDCIKVAAVLNNAFYLENLHFTIEGKDTHYFIKTTTPESDLGTLRLTSGRKALENGINVTVSQSTTVVNGRTRRFADVEMQFGALALHVRYGMTLDEEKARILEQARQRALARAWAREQQRVRDGEEGARLWTEGEKRQLLSAGKVQGYDGYYVLSVEQYPELADSANNIQFLRQSEIGRR

SEQ ID NO: 547 - DNA, 8657 bp, Homo sapiens
  CDS (151)..(8325)
tttggcctcgggccagaattcggcacgaggggtctggagcttggaggagaagtctgaactaaggataaactaaagagaggccaatgagacttgaaccctgagcctaagttgtcaccagcaggactgatgtgcacacagaaggaatgaagtatggatgtgaaagaacgcaggccttactgctccctgaccaagagcagacgagagaaggaacggcgctacacaaattcctccgcagacaatgaggagtgccgggtacccacacagaagtcctacagttccagcgagacattgaaagcttttgatcatgattcctcgcggctgctttacggcaacagagtgaaggatttggttcacagagaagcagacgagttcactagacaaggacagaattttaccctaaggcagttaggagtttgtgaaccagcaactcgaagaggactggcattttgtgcggaaatggggctccctcacagaggttactctatcagtgcagggtcagatgctgatactgaaaatgaagcagtgatgtccccagagcatgccatgagactttggggcaggggggtcaaatcaggccgcagctcctgcctgtcaagtcggtccaactcagccctcaccctgacagatacggagcacgaaaacaagtccgacagtgagaatgagcaacctgcaagcaatcaaggccagtctaccctgcagcccttgccgccttcccataagcagcactctgcacagcatcatccatccatcacttctctcaacagaaactccctgaccaatagaaggaaccagagtccggccccgccggctgctttgcccgccgagctgcaaaccacacccgagtccgtccagctgcaggacagctgggtccttggcagtaatgtaccactggaaagcaggcatttcctattcaaaacaggaacaggtacaacgccactgttcagtactgcaaccccaggatacacaatggcatctggctctgtttattcaccacctactcggccactacctagaaacaccctatcaagaagtgcttttaaattcaagaagtcttcaaagtactgtagctggaaatgcactgcactgtgtgccgtaggggtctcggtgctcctggcaatactcctgtcttattttatagcaatgcatctctttggcctcaactggcagctacagcagactgaaaatgacacatttgagaatggaaaagtgaattctgataccatgccaacaaacactgtgtcattaccttctggagacaatggaaaattaggtggatttacgcaagaaaataacaccatagattccggagaacttgatattggccgaagagcaattcaagagattcctcccgggatcttctggagatcacagctcttcattgatcagccacagtttcttaaattcaatatctctcttcagaaggatgcattgattggagtatatggccggaagaagttaccgccttcccatactcagtcctccccccagtatgacttcgtggagctcctggatggcagcaggctgattgccagagagcagcggagcctgcttgagacggagagagccgggcggcaggcgagatccgtcagccttcatgaggccggctttatccagtacttggattctggaatctggcatctggctttttataatgatgggaaaaatgcagagcaggtgtcttttaataccattgttatagagtctgtggtggaatgtccccgaaattgccatggaaatggagaatgcgtttctggaacttgccattgttttccaggatttctgggtccggattgttcaagagccgcctgtccagtgttatgtagtggcaacgggcagtactccaagggccgctgcctgtgtttcagcggctggaagggcaccgagtgtgatgtgccgactacccagtgtattgacccacagtgtgggggtcgtgggatttgtatcatgggctcttgtgcttgcagctcaggatacaaaggagaaagttgtgaagaagctgactgtatagaccctgggtgttctaatcatggtgtgtgtatccacggggaatgtcactgcagtccaggatggggaggtagcaattgtgaaatactgaagaccatgtgtccagaccagtgctccggccacggaacgtatcttcaagaaagtggctcctgcacgtgtgaccctaactggactggcccagactgctcaaacgaaatatgttctgtggactgtggctcacacggcgtttgcatgggggggacgtgtcgctgtgaagaaggctggacgggcccagcctgtaatcagagagcctgccacccccgctgtgccgagcacgggacctgcaaggatggcaagtgtgaatgcagccagggctggaatggagagcactgcactatcgctcactatttggataagatagttaaagacaagataggatataaagagggttgtcctggtctgtgcaacagcaatggaagatgtaccctggaccaaaatggcggacattgtgtgtgccagcctggatggagaggagcaggctgtgacgtagccatggagactctttgcacagatagcaaggacaatgaaggggatggactcattgactgcatggatcccgattgctgcctacagagttcctgccagaatcagccctattgtcggggactgccggatcctcaggacatcattagccaaagccttcaatcgccttctcagcaagctgccaaatccttttatgatcgaatcagtttccttataggatctgatagcacccatgttatacctggagaaagtcctttcaataagagccttgcatctgtcatcagaggccaagtactgactgctgatggaactccacttattggagtaaatgtctcgtttttccattacccagaatatggatatactattacccgccaggacggaatgtttgacttggtggcaaatggtggggcctctctaactttggtatttgaacgatccccattcctcactcagtatcatactgtgtggattccatggaatgtcttttatgtgatggataccctagtcatggagaaagaagagaatgacattcccagctgtgatctgagtggattcgtgaggccaaatcccatcattgtgtcatcacctttatccacctttttcagatcttctcctgaagacagtcccatcattcccgaaacacaggtactccacgaggaaactacaattccaggaacagatttgaaactctcctacttgagttccagagctgcagggtataagtcagttctcaagatcaccatgacccagtctattattccatttaatttaatgaaggttcatcttatggtagctgtagtaggaagactcttccaaaagtggtttcctgcctcaccaaacttggcctatactttcatatgggataaaacagatgcatataatcagaaagtctatggtctatctgaagctgttgtgtcagttggatatgagtatgagtcgtgtttggacctgactctgtgggaaaagaggactgccattctgcagggctatgaattggatgcgtccaacatgggtggctggacattagataaacatcacgtgctggatgtacagaacggtatactgtacaagggaaacggggaaaaccagttcatctcccagcagcctccagtcgtgagtagcatcatgggcaatgggcgaaggcgcagcatttcctgccccagttgcaatggtcaagctgatggtaacaagttactggccccagtggcgctagcttgtgggatcgatggcagtctgtacgtaggcgatttcaactacgtgcggcggatattcccttctggaaatgtaacaagtgtcttagaactaagaaataaagattttagacatagcagcaacccagctcatagatactaccttgcaacggatccagtcacgggagatctgtacgtttctgacacaaacacccgcagaatttatcgcccaaagtcacttacgggggcaaaagacttgactaaaaatgcagaagtcgtcgcagggacaggggagcaatgccttccgtttgacgaggcgagatgtggggatggagggaaggccgtggaagccacactcatgagtcccaaaggaatggcagttgataagaatggattaatctactttgttgatggaaccatgattaggaaagttgaccaaaatggaatcatatcaactcttctgggctctaacgatttgacttcagccagacctttaacttgtgacaccagcatgcacatcagccaggtacgtctggaatggcccactgacctagccattaaccctatggataactccatttatgtcctggataataatgtagttttacagatcactgaaaatcgtcaagttcgcattgctgctggacggcccatgcactgtcaggttcccggagtggaatatcctgtggggaagcacgcggtgcagacaacactggaatcagccactgccattgctgtgtcctacagtggggtcctgtacattactgaaactgatgagaagaaaattaaccggataaggcaggtcacaacagatggagaaatctccttagtggccggaataccttcagagtgtgactgcaaaaatgatgccaactgtgactgttaccagagtggagatggctacgccaaggatgccaaactcagtgccccatcctccctggctgcttctccagatggtacactgtatattgcagatctagggaatatccggatccgggctgtgtcaaagaataagcctttacttaactctatgaacttctatgaagttgcgtctccaactgatcaagaactctacatctttgacatcaatggtactcaccaatatactgtaagtttagtcactggtgattacctttacaattttagctacagcaatgacaatgatattactgctgtgacagacagcaatggcaacacccttagaattagacgggacccaaatcgcatgccagttcgagtggtgtctcctgataaccaagtgatatggttgacaataggaacaaatggatgtttgaaaggcatgactgctcaaggactggaattagttttgtttacttaccatggcaatagtggccttttagccactaaaagtgatgaaactggatggacaacgttttttgactatgacagtgaaggtcgtctgacaaatgttacgtttccaactggagtggtcacaaacctgcatggggacatggacaaggctatcacagtggacattgagtcatctagccgagaagaagatgtcagcatcacttcaaatctgtcctcgatcgattctttctacaccatggttcaagatcagttaagaaacagctaccagattggttatgacggctccctcagaattatctacgccagtggcctggactcacactaccaaacagagccgcacgttctggctggcaccgctaatccgacggttgccaaaagaaacatgactttgcctggcgagaacggtcaaaacttggtggaatggagattccgaaaagagcaagcccaagggaaagtcaatgtctttggccgcaagctcagggttaatggcagaaacctcctttcagttgactttgatcgaacaacaaagacagaaaagatctatgacgaccaccgtaaatttctactgaggatcgcctacgacacgtctgggcacccgactctctggctgccaagcagcaagctgatggccgtcaatgtcacctattcatccacaggtcaaattgccagcatccagcgaggcaccactagcgagaaagtagattatgacggacaggggaggatcgtgtctcgggtctttgctgatggtaaaacatggagttacacatatttagaaaagtccatggttcttctgcttcatagccagcggcagtacatcttcgaatacgatatgtgggaccgcctgtctgccatcaccatgcccagtgtggctcgccacaccatgcagaccatccgatccattggctactaccgcaacatatacaaccccccggaaagcaacgcctccatcatcacggactacaacgaggaagggctgcttctacaaacagctttcttgggtacaagtcggagggtcttattcaaatacagaaggcagactaggctctcagaaattttatatgatagcacaagagtcagttttacctatgatgaaacagcaggagtcctaaagacagtaaacctccagagtgatggttttatttgcaccattagatacaggcaaattggtcccctgattgacaggcagattttccgctttagtgaagatgggatggtaaatgcaagatttgactatagctatgacaacagctttcgagtgaccagcatgcagggtgtgatcaatgaaacgccactgcctattgatctgtatcagtttgatgacatttctggcaaagttgagcagtttggaaagtttggagttatatattatgatattaaccagatcatttctacagctgtaatgacctatacgaagcactttgatgctcatggccgtatcaaggagattcaatatgagatattcaggtcgctcatgtactggattacaattcagtatgataacatgggtcgggtaaccaagagagagattaaaatagggccctttgccaacaccaccaaatatgcttatgaatatgatgttgatggacagctccaaacagtttacctcaatgaaaagataatgtggcggtacaactacgatctgaatggaaacctccatttactgaacccaagtaacagtgcgcgtctgacaccccttcgctatgacctgcgagacagaatcactcgactgggtgatgttcaatatcggttggatgaagatggtttcctacgtcaaaggggcacggaaatctttgaatatagctccaaggggcttctaactcgagtttacagtaaaggcagtggctggacagtgatctaccgttatgacggcctgggaaggcgtgtttctagcaaaaccagtctaggacagcacctgcagtttttttatgctgacttaacttatcccactaggattactcatgtctacaaccattcgagttcagaaattacctccctgtattatgatctccaaggacatctttttgccatggaaatcagcagtggggatgaattctatattgcatcggataacacagggacaccactggctgtgttcagtagcaatgggcttatgctgaaacagattcagtacactgcatatggggaaatctattttgactctaatattgactttcaactggtaattggatttcatggtggcctgtatgacccactcaccaaattaatccactttggagaaagagattatgacattttggcaggacggtggacaacacctgacatagaaatctggaaaagaattgggaaggacccagctccttttaacttgtacatgtttaggaataacaaccctgcaagcaaaatccatgacgtgaaagattacatcacagatgttaacagctggctggtgacatttggtttccatctgcacaatgctattcctggattccctgttcccaaatttgatttaacagaaccttcttacgaacttgtgaagagtcagcagtgggatgatataccgcccatcttcggagtccagcagcaagtggcgcggcaggccaaggccttcctgtcgctggggaagatggccgaggtgcaggtgagccggcgccgggccggcggcgcgcagtcctggctgtggttcgccacggtcaagtcgctgatcggcaagggcgtcatgctggccgtcagccagggccgcgtgcagaccaacgtgctcaacatcgccaacgaggactgcatcaaggtggcggccgtgctcaacaacgccttctacctggagaacctgcacttcaccatcgagggcaaggacacgcactacttcatcaagaccaccacgcccgagagcgacctgggcacgctgcggttgaccagcggccgcaaggcgctggagaacggcatcaacgtgacggtgtcgcagtccaccacggtggtgaacggcaggacgcgcaggttcgcggacgtggagatgcagttcggcgcgctggcgctgcacgtgcgctacggcatgaccctggacgaggagaaggcgcgcatcctggagcaggcgcggcagcgcgcgctcgcccgggcctgggcgcgcgagcagcagcgcgtgcgcgacggcgaggagggcgcgcgcctctggacggagggcgagaagcggcagctgctgagcgccggcaaggtgcagggctacgacgggtactacgtactctcggtggagcagtaccccgagctggccgacagcgccaacaacatccagttcctgcggcagagcgagatcggcaggaggtaacgcccgggccgcgcccgccgagccgctcacgccctgcccacattgtcctgtggcacaacccgagtgggactctccaacgcccaagagccttcctcccgggggaatgagactgctgttacgacccacacccacaccgcgaaaacaaggaccgcttttttccgaatgaccttaaaggtgatcggctttaacgaatatgtttacatatgcatagcgctgcactcagtcggactgaacgtagccagaggaaaaaaaaatcatcaaggacaaaggcctcgacctgttgcgctgggccgtctgttccttctaggcactgtatttaactaacttta

SEQ ID NO: 548 - protein, 2725 aa, Homo sapiens; identical to SEQ ID NO: 486

SEQ ID NO: 549 - DNA, 8657 bp, Homo sapiens
  CDS (151)..(8325)
tttggcctcgggccagaattcggcacgaggggtctggagcttggaggagaagtctgaactaaggataaactaaagagaggccaatgagacttgaaccctgagcctaagttgtcaccagcaggactgatgtgcacacagaaggaatgaagtatggatgtgaaagaacgcaggccttactgctccctgaccaagagcagacgagagaaggaacggcgctacacaaattcctccgcagacaatgaggagtgccgggtacccacacagaagtcctacagttccagcgagacattgaaagcttttgatcatgattcctcgcggctgctttacggcaacagagtgaaggatttggttcacagagaagcagacgagttcactagacaaggacagaattttaccctaaggcagttaggagtttgtgaaccagcaactcgaagaggactggcattttgtgcggaaatggggctccctcacagaggttactctatcagtgcagggtcagatgctgatactgaaaatgaagcagtgatgtccccagagcatgccatgagactttggggcaggggggtcaaatcaggccgcagctcctgcctgtcaagtcggtccaactcagccctcaccctgacagatacggagcacgaaaacaagtccgacagtgagaatgagcaacctgcaagcaatcaaggccagtctaccctgcagcccttgccgccttcccataagcagcactctgcacagcatcatccatccatcacttctctcaacagaaactccctgaccaatagaaggaaccagagtccggccccgccggctgctttgcccgccgagctgcaaaccacacccgagtccgtccagctgcaggacagctgggtccttggcagtaatgtaccactggaaagcaggcatttcctattcaaaacaggaacaggtacaacgccactgttcagtactgcaaccccaggatacacaatggcatctggctctgtttattcaccacctactcggccactacctagaaacaccctatcaagaagtgcttttaaattcaagaagtcttcaaagtactgtagctggaaatgcactgcactgtgtgccgtaggggtctcggtgctcctggcaatactcctgtcttattttatagcaatgcatctctttggcctcaactggcagctacagcagactgaaaatgacacatttgagaatggaaaagtgaattctgataccatgccaacaaacactgtgtcattaccttctggagacaatggaaaattaggtggatttacgcaagaaaataacaccatagattccggagaacttgatattggccgaagagcaattcaagagattcctcccgggatcttctggagatcacagctcttcattgatcagccacagtttcttaaattcaatatctctcttcagaaggatgcattgattggagtatatggccggaagaagttaccgccttcccatactcagtcctccccccagtatgacttcgtggagctcctggatggcagcaggctgattgccagagagcagcggagcctgcttgagacggagagagccgggcggcaggcgagatccgtcagccttcatgaggccggctttatccagtacttggattctggaatctggcatctggctttttataatgatgggaaaaatgcagagcaggtgtcttttaataccattgttatagagtctgtggtggaatgtccccgaaattgccatggaaatggagaatgcgtttctggaacttgccattgttttccaggatttctgggtccggattgttcaagagccgcctgtccagtgttatgtagtggcaacgggcagtactccaagggccgctgcctgtgtttcagcggctggaagggcaccgagtgtgatgtgccgactacccagtgtattgacccacagtgtgggggtcgtgggatttgtatcatgggctcctgtgcttgcagctcaggatacaaaggagaaagttgtgaagaagctgactgtatagaccctgggtgttctaatcatggtgtgtgtatccacggggaatgtcactgcagtccaggatggggaggtagcaattgtgaaatactgaagaccatgtgtccagaccagtgctccggccacggaacgtatcttcaagaaagtggctcctgcacgtgtgaccctaactggactggcccagactgctcaaacgaaatatgttctgtggactgtggctcacacggcgtttgcatgggggggacgtgtcgctgtgaagaaggctggacgggcccagcctgtaatcagagagcctgccacccccgctgtgccgagcacgggacctgcaaggatggcaagtgtgaatgcagccagggctggaatggagagcactgcactatcgctcactatttggataagatagttaaagacaagataggatataaagagggttgtcctggtctgtgcaacagcaatggaagatgtaccctggaccaaaatggcggacattgtgtgtgccagcctggatggagaggagcaggctgtgacgtagccatggagactctttgcacagatagtaaggacaatgaaggggatggactcattgactgcatggatcccgattgctgcctacagagttcctgccagaatcagccctattgtcggggactgccggatcctcaggacatcattagccaaagccttcaatcgccttctcagcaagctgccaaatccttttatgatcgaatcagtttccttataggatctgatagcacccatgttatacctggagaaagtcctttcaataagagccttgcatctgtcatcagaggccaagtactgactgctgatggaactccacttattggagtaaatgtctcgtttttccattacccagaatatggatatactattacccgccaggacggaatgtttgacttggtggcaaatggtggggcctctctaactttggtatttgaacgatccccattcctcactcagtatcatactgtgtggattccatggaatgtcttttatgtgatggataccctagtcatggagaaagaagagaatgacattcccagctgtgatctgagtggattcgtgaggccaaatcccatcattgtgtcatcacctttatccacctttttcagatcttctcctgaagacagtcccatcattcccgaaacacaggtactccacgaggaaactacaattccaggaacagatttgaaactctcctacttgagttccagagctgcagggtataagtcagttctcaagatcaccatgacccagtctattattccatttaatttaatgaaggttcatcttatggtagctgtagtaggaagactcttccaaaagtggtttcctgcctcaccaaacttggcctatactttcatatgggataaaacagatgcatataatcagaaagtctatggtctatctgaagctgttgtgtcagttggatatgagtatgagtcgtgtttggacctgactctgtgggaaaagaggactgccattctgcagggctatgaattggatgcgtccaacatgggtggctggacattagataaacatcacgtgctggatgtacagaacggtatactgtacaagggaaacggggaaaaccagttcatctcccagcagcctccagtcgtgagtagcatcatgggcaatgggcgaaggcgcagcatttcctgccccagttgcaatggtcaagctgatggtaacaagttactggccccagtggcgctagcttgtgggatcgatggcagtctgtacgtaggcgatttcaactacgtgcggcggatattcccttctggaaatgtaacaagtgtcttagaactaagaaataaagattttagacatagcagcaacccagctcatagatactaccttgcaacggatccagtcacgggagatctgtacgtttctgacacaaacacccgcagaatttatcgcccaaagtcacttacgggggcaaaagacttgactaaaaatgcagaagtcgtcgcagggacaggggagcaatgccttccgtttgacgaggcgagatgtggggatggagggaaggccgtggaagccacactcatgagtcccaaaggaatggcagttgataagaatggattaatctactttgttgatggaaccatgattaggaaagttgaccaaaatggaatcatatcaactcttctgggctctaacgatttgacttcagccagacctttaacttgtgacaccagcatgcacatcagccaggtacgtctggaatggcccactgacctagccattaaccctatggataactccatttatgtcctggataataatgtagttttacagatcactgaaaatcgtcaagttcgcattgctgctggacggcccatgcactgtcaggttcccggagtggaatatcctgtggggaagcacgcggtgcagacaacactggaatcagccactgccattgctgtgtcctacagtggggtcctgtacattactgaaactgatgagaagaaaattaaccggataaggcaggtcacaacagatggagaaatctccttagtggccggaataccttcagagtgtgactgcaaaaatgatgccaactgtgactgttaccagagtggagatggctacgccaaggatgccaaactcagtgccccatcctccctggctgcttctccagatggtacactgtatattgcagatctagggaatatccggatccgggctgtgtcaaagaataagcctttacttaactctatgaacttctatgaagttgcgtctccaactgatcaagaactctacatctttgacatcaatggtactcaccaatatactgtaagtttagtcactggtgattacctttacaattttagctacagcaatgacaatgatattactgctgtgacagacagcaatggcaacacccttagaattagacgggacccaaatcgcatgccagttcgagtggtgtctcctgataaccaagtgatatggttgacaataggaacaaatggatgtttgaaaggcatgactgctcaaggactggaattagttttgtttacttaccatggcaatagtggccttttagccactaaaagtgatgaaactggatggacaacgttttttgactatgacagtgaaggtcgtctgacaaatgttacgtttccaactggagtggtcacaaacctgcatggggacatggacaaggctatcacagtggacattgagtcatctagccgagaagaagatgtcagcatcacttcaaatctgtcctcgatcgattctttctacaccatggttcaagatcagttaagaaacagctaccagattggttatgacggctccctcagaattatctacgccagtggcctggactcacactaccaaacagagccgcacgttctggctggcaccgctaatccgacggttgccaaaagaaacatgactttgcctggcgagaacggtcaaaacttggtggaatggagattccgaaaagagcaagcccaagggaaagtcaatgtctttggccgcaagctcagggttaatggcagaaacctcctttcagttgactttgatcgaacaacaaagacagaaaagatctatgacgaccaccgtaaatttctactgaggatcgcctacgacacgtctgggcacccgactctctggctgccaagcagcaagctgatggccgtcaatgtcacctattcatccacaggtcaaattgccagcatccagcgaggcaccactagcgagaaagtagattatgacggacaggggaggatcgtgtctcgggtctttgctgatggtaaaacatggagttacacatatttagaaaagtccatggttcttctgcttcatagccagcggcagtacatcttcgaatacgatatgtgggaccgcctgtctgccatcaccatgcccagtgtggctcgccacaccatgcagaccatccgatccattggctactaccgcaacatatacaaccccccggaaagcaacgcctccatcatcacggactacaacgaggaagggctgcttctacaaacagctttcttgggtacaagtcggagggtcttattcaaatacagaaggcagactaggctctcagaaattttatatgatagcacaagagtcagttttacctatgatgaaacagcaggagtcctaaagacagtaaacctccagagtgatggttttatttgcaccattagatacaggcaaattggtcccctgattgacaggcagattttccgctttagtgaagatgggatggtaaatgcaagatttgactatagctatgacaacagctttcgagtgaccagcatgcagggtgtgatcaatgaaacgccactgcctattgatctgtatcagtttgatgacatttctggcaaagttgagcagtttggaaagtttggagttatatattatgatattaaccagatcatttctacagctgtaatgacctatacgaagcactttgatgctcatggccgtatcaaggagattcaatatgagatattcaggtcgctcatgtactggattacaattcagtatgataacatgggtcgggtaaccaagagagagattaaaatagggccctttgccaacaccaccaaatatgcttatgaatatgatgttgatggacagctccaaacagtttacctcaatgaaaagataatgtggcggtacaactacgatctgaatggaaacctccatttactgaacccaagtaacagtgcgcgtctgacaccccttcgctatgacctgcgagacagaatcactcgactgggtgatgttcaatatcggttggatgaagatggtttcctacgtcaaaggggcacggaaatctttgaatatagctccaaggggcttctaactcgagtttacagtaaaggcagtggctggacagtgatctaccgttatgacggcctgggaaggcgtgtttctagcaaaaccagtctaggacagcacctgcagtttttttatgctgacttaacttatcccactaggattactcatgtctacaaccattcgagttcagaaattacctccctgtattatgatctccaaggacatctttttgccatggaaatcagcagtggggatgaattctatattgcatcggataacacagggacaccactggctgtgttcagtagcaatgggcttatgctgaaacagattcagtacactgcatatggggaaatctattttgactctaatattgactttcaactggtaattggatttcatggtggcctgtatgacccactcaccaaattaatccactttggagaaagagattatgacattttggcaggacggtggacaacacctgacatagaaatctggaaaagaattgggaaggacccagctccttttaacttgtacatgtttaggaataacaaccctgcaagcaaaatccatgacgtgaaagattacatcacagatgttaacagctggctggtgacatttggtttccatctgcacaatgctattcctggattccctgttcccaaatttgatttaacagaaccttcttacgaacttgtgaagagtcagcagtgggatgatataccgcccatcttcggagtccagcagcaagtggcgcggcaggccaaggccttcctgtcgctggggaagatggccgaggtgcaggtgagccggcgccgggccggcggcgcgcagtcctggctgtggttcgccacggtcaagtcgctgatcggcaagggcgtcatgctggccgtcagccagggccgcgtgcagaccaacgtgctcaacatcgccaacgaggactgcatcaaggtggcggccgtgctcaacaacgccttctacctggagaacctgcacttcaccatcgagggcaaggacacgcactacttcatcaagaccaccacgcccgagagcgacctgggcacgctgcggttgaccagcggccgcaaggcgctggagaacggcatcaacgtgacggtgtcgcagtccaccacggtggtgaacggcaggacgcgcaggttcgcggacgtggagatgcagttcggcgcgctggcgctgcacgtgcgctacggcatgaccctggacgaggagaaggcgcgcatcctggagcaggcgcggcagcgcgcgctcgcccgggcctgggcgcgcgagcagcagcgcgtgcgcgacggcgaggagggcgcgcgcctctggacggagggcgagaagcggcagctgctgagcgccggcaaggtgcagggctacgacgggtactacgtactctcggtggagcagtaccccgagctggccgacagcgccaacaacatccagttcctgcggcagagcgagatcggcaggaggtaacgcccgggccgcgcccgccgagccgctcacgccctgcccacattgtcctgtggcacaacccgagtgggactctccaacgcccaagagccttcctcccgggggaatgagactgctgttacgacccacacccacaccgcgaaaacaaggaccgcttttttccgaatgaccttaaaggtgatcggctttaacgaatatgtttacatatgcatagcgctgcactcagtcggactgaacgtagccagaggaaaaaaaaatcatcaaggacaaaggcctcgacctgttgcgctgggccgtctgttccttctaggcactgtatttaactaacttta

SEQ ID NO: 550 - protein, 2725 aa, Homo sapiens; identical to SEQ ID NO: 486

SEQ ID NO: 551 - DNA, 8657 bp, Homo sapiens
  CDS (151)..(8325)
tttggcctcgggccagaattcggcacgaggggtctggagcttggaggagaagtctgaactaaggataaactaaagagaggccaatgagacttgaaccctgagcctaagttgtcaccagcaggactgatgtgcacacagaaggaatgaagtatggatgtgaaagaacgcaggccttactgctccctgaccaagagcagacgagagaaggaacggcgctacacaaattcctccgcagacaatgaggagtgccgggtacccacacagaagtcctacagttccagcgagacattgaaagcttttgatcatgattcctcgcggctgctttacggcaacagagtgaaggatttggttcacagagaagcagacgagttcactagacaaggacagaattttaccctaaggcagttaggagtttgtgaaccagcaactcgaagaggactggcattttgtgcggaaatggggctccctcacagaggttactctatcagtgcagggtcagatgctgatactgaaaatgaagcagtgatgtccccagagcatgccatgagactttggggcaggggggtcaaatcaggccgcagctcctgcctgtcaagtcggtccaactcagccctcaccctgacagatacggagcacgaaaacaagtccgacagtgagaatgagcaacctgcaagcaatcaaggccagtctaccctgcagcccttgccgccttcccataagcagcactctgcacagcatcatccatccatcacttctctcaacagaaactccctgaccaatagaaggaaccagagtccggccccgccggctgctttgcccgccgagctgcaaaccacacccgagtccgtccagctgcaggacagctgggtccttggcagtaatgtaccactggaaagcaggcatttcctattcaaaacaggaacaggtacaacgccactgttcagtactgcaaccccaggatacacaatggcatctggctctgtttattcaccacctactcggccactacctagaaacaccctatcaagaagtgcttttaaattcaagaagtcttcaaagtactgtagctggaaatgcactgcactgtgtgccgtaggggtctcggtgctcctggcaatactcctgtcttattttatagcaatgcatctctttggcctcaactggcagctacagcagactgaaaatgacacatttgagaatggaaaagtgaattctgataccatgccaacaaacactgtgtcattaccttctggagacaatggaaaattaggtggatttacgcaagaaaataacaccatagattccggagaacttgatattggccgaagagcaattcaagagattcctcccgggatcttctggagatcacagctcttcattgatcagccacagtttcttaaattcaatatctctcttcagaaggatgcattgattggagtatatggccggaagaagttaccgccttcccatactcagtcctccccccagtatgacttcgtggagctcctggatggcagcaggctgattgccagagagcagcggagcctgcttgagacggagagagccgggcggcaggcgagatccgtcagccttcatgaggccggctttatccagtacttggattctggaatctggcatctggctttttataatgatgggaaaaatgcagagcaggtgtcttttaataccattgttatagagtctgtggtggaatgtccccgaaattgccatggaaatggagaatgcgtttctggaacttgccattgttttccaggatttctgggtccggattgttcaagagccgcctgtccagtgttatgtagtggcaacgggcagtactccaagggccgctgcctgtgtttcagcggctggaagggcaccgagtgtgatgtgccgactacccagtgtattgacccacagtgtgggggtcgtgggatttgtatcatgggctcctgtgcttgcagctcaggatacaaaggagaaagttgtgaagaagctgactgtatagaccctgggtgttctaatcatggtgtgtgtatccacggggaatgtcactgcagtccaggatggggaggtagcaattgtgaaatactgaagaccatgtgtccagaccagtgctccggccacggaacgtatcttcaagaaagtggctcctgcacgtgtgaccctaactggactggcccagactgctcaaacgaaatatgttctgtggactgtggctcacacggcgtttgcatgggggggacgtgtcgctgtgaagaaggctggacgggcccagcctgtaatcagagagcctgccacccccgctgtgccgagcacgggacctgcaaggatggcaagtgtgaatgcagccagggctggaatggagagcactgcactatcgctcactatttggataagatagttaaagacaagataggatataaagagggttgtcctggtctgtgcaacagcaatggaagatgtaccctggaccaaaatggcggacattgtgtgtgccagcctggatggagaggagcaggctgtgacgtagccatggagactctttgcacagatagcaaggacaatgaaggggatggactcattgactgcatggatcccgattgctgcctacagagttcctgccagaatcagccctattgtcggggactgccggatcctcaggacatcattagccaaagccttcaatcgccttctcagcaagctgccaaatccttttatgatcgaatcagtttccttataggatctgatagcacccatgttatacctggagaaagtcctttcaataagagccttgcatctgtcatcagaggccaagtactgactgctgatggaactccacttattggagtaaatgtctcgtttttccattacccagaatatggatatactattacccgccaggacggaatgtttgacttggtggcaaatggtggggcctctctaactttggtatttgaacgatccccattcctcactcagtatcatactgtgtggattccatggaatgtcttttatgtgatggataccctagtcatggagaaagaagagaatgacattcccagctgtgatctgagtggattcgtgaggccaaatcccatcattgtgtcatcacctttatccacctttttcagatcttctcctgaagacagtcccatcattcccgaaacacaggtactccacgaggaaactacaattccaggaacagatttgaaactctcctacttgagttccagagctgcagggtataagtcagttctcaagatcaccatgacccagtctattattccatttaatttaatgaaggttcatcttatggtagctgtagtaggaagactcttccaaaagtggtttcctgcctcaccaaacttggcctatactttcatatgggataaaacagatgcatataatcagaaagtctatggtctatctgaagctgttgtgtcagttggatatgagtatgagtcgtgtttggacctgactctgtgggaaaagaggactgccattctgcagggctatgaattggatgcgtccaacatgggtggctggacattagataaacatcacgtgctggatgtacagaacggtatactgtacaagggaaacggggaaaaccagttcatctcccagcagcctccagtcgtgagtagcatcatgggcaatgggcgaaggcgcagcatttcctgccccagttgcaatggtcaagctgatggtaacaagttactggccccagtggcgctagcttgtgggatcgatggcagtctgtacgtaggcgatttcaactacgtgcggcggatattcccttctggaaatgtaacaagtgtcttagaactaagaaataaagattttagacatagcagcaacccagctcatagatactaccttgcaacggatccagtcacgggagatctgtacgtttctgacacaaacacccgcagaatttatcgcccaaagtcacttacgggggcaaaagacttgactaaaaatgcagaagtcgtcgcagggacaggggagcaatgccttccgtttgacgaggcgagatgtggggatggagggaaggccgtggaagccacactcatgagtcccaaaggaatggcagttgataagaatggattaatctactttgttgatggaaccatgattaggaaagttgaccaaaatggaatcatatcaactcttctgggctctaacgatttgacttcagccagacctttaacttgtgacaccagcatgcacatcagccaggtacgtctggaatggcccactgacctagccattaaccctatggataactccatttatgtcctggataataatgtagttttacagatcactgaaaatcgtcaagttcgcattgctgctggacggcccatgcactgtcaggttcccggagtggaatatcctgtggggaagcacgcggtgcagacaacactggaatcagccactgccattgctgtgtcctacagtggggtcctgtacattactgaaactgatgagaagaaaattaaccggataaggcaggtcacaacagatggagaaatctccttagtggccggaataccttcagagtgtgactgcaaaaatgatgccaactgtgactgttaccagagtggagatggctacgccaaggatgccaaactcagtgccccatcctccctggctgcttctccagatggtacactgtatattgcagatctagggaatatccggatccgggctgtgtcaaagaataagcctttacttaactctatgaacttctatgaagttgcgtctccaactgatcaagaactctacatctttgacatcaatggtactcaccaatatactgtaagtttagtcactggtgattacctttacaattttagctacagcaatgacaatgatattactgctgtgacagacagcaatggcaacacccttagaattagacgggacccaaatcgcatgccagttcgagtggtgtctcctgataaccaagtgatatggttgacaataggaacaaatggatgtttgaaaggcatgactgctcaaggactggaattagttttgtttacttaccatggcaatagtggccttttagccactaaaagtgatgaaactggatggacaacgttttttgactatgacagtgaaggtcgtctgacaaatgttacgtttccaactggagtggtcacaaacctgcatggggacatggacaaggctatcacagtggacattgagtcatctagccgagaagaagatgtcagcatcacttcaaatctgtcctcgatcgattctttctacaccatggttcaagatcagttaagaaacagctaccagattggttatgacggctccctcagaattatctacgccagtggcctggactcacactaccaaacagagccgcacgttctggctggcaccgctaatccgacggttgccaaaagaaacatgactttgcctggcgagaacggtcaaaacttggtggaatggagattccgaaaagagcaagcccaagggaaagtcaatgtctttggccgcaagctcagggttaatggcagaaacctcctttcagttgactttgatcgaacaacaaagacagaaaagatctatgacgaccaccgtaaatttctactgaggatcgcctacgacacgtctgggcacccgactctctggctgccaagcagcaagctgatggccgtcaatgtcacctattcatccacaggtcaaattgccagcatccagcgaggcaccactagcgagaaagtagattatgacggacaggggaggatcgtgtctcgggtctttgctgatggtaaaacatggagttacacatatttagaaaagtccatggttcttctgcttcatagccagcggcagtacatcttcgaatacgatatgtgggaccgcctgtctgccatcaccatgcccagtgtggctcgccacaccatgcagaccatccgatccattggctactaccgcaacatatacaaccccccggaaagcaacgcctccatcatcacggactacaacgaggaagggctgcttctacaaacagctttcttgggtacaagtcggagggtcttattcaaatacagaaggcagactaggctctcagaaattttatatgatagcacaagagtcagttttacctatgatgaaacagcaggagtcctaaagacagtaaacctccagagtgatggttttatttgcaccattagatacaggcaaattggtcccctgattgacaggcagattttccgctttagtgaagatgggatggtaaatgcaagatttgactatagctatgacaacagctttcgagtgaccagcatgcagggtgtgatcaatgaaacgccactgcctattgatctgtatcagtttgatgacatttctggcaaagttgagcagtttggaaagtttggagttatatattatgatattaaccagatcatttctacagctgtaatgacctatacgaagcactttgatgctcatggccgtatcaaggagattcaatatgagatattcaggtcgctcatgtactggattacaattcagtatgataacatgggtcgggtaaccaagagagagattaaaatagggccctttgccaacaccaccaaatatgcttatgaatatgatgttgatggacagctccaaacagtttacctcaatgaaaagataatgtggcggtacaactacgatctgaatggaaacctccatttactgaacccaagtaacagtgcgcgtctgacaccccttcgctatgacctgcgagacagaatcactcgactgggtgatgttcaatatcggttggatgaagatggtttcctacgtcaaaggggcacggaaatctttgaatatagctccaaggggcttctaactcgagtttacagtaaaggcagtggctggacagtgatctaccgttatgacggcctgggaaggcgtgtttctagcaaaaccagtctaggacagcacctgcagtttttttatgctgacttaacttatcccactaggattactcatgtctacaaccattcgagttcagaaattacctccctgtattatgatctccaaggacatctttttgccatggaaatcagcagtggggatgaattctatattgcatcggataacacagggacaccactggctgtgttcagtagcaatgggcttatgctgaaacagattcagtacactgcatatggggaaatctattttgactctaatattgactttcaactggtaattggatttcatggtggcctgtatgacccactcaccaaattaatccactttggagaaagagattatgacattttggcaggacggtggacaacacctgacatagaaatctggaaaagaattgggaaggacccagctccttttaacttgtacatgtttaggaataacaaccctgcaagcaaaatccatgacgtgaaagattacatcacagatgttaacagctggctggtgacatttggtttccatctgcacaatgctattcctggattccctgttcccaaatttgatttaacagaaccttcttacgaacttgtgaagagtcagcagtgggatgatataccgcccatcttcggagtccagcagcaagtggcgcggcaggccaaggccttcctgtcgctggggaagatggccgaggtgcaggtgagccggcgccgggccggcggcgcgcagtcctggctgtggttcgccacggtcaagtcgctgatcggcaagggcgtcatgctggccgtcagccagggccgcgtgcagaccaacgtgcttaacatcgccaacgaggactgcatcaaggtggcggccgtgctcaacaacgccttctacctggagaacctgcacttcaccatcgagggcaaggacacgcactacttcatcaagaccaccacgcccgagagcgacctgggcacgctgcggttgaccagcggccgcaaggcgctggagaacggcatcaacgtgacggtgtcgcagtccaccacggtggtgaacggcaggacgcgcaggttcgcggacgtggagatgcagttcggcgcgctggcgctgcacgtgcgctacggcatgaccctggacgaggagaaggcgcgcatcctggagcaggcgcggcagcgcgcgctcgcccgggcctgggcgcgcgagcagcagcgcgtgcgcgacggcgaggagggcgcgcgcctctggacggagggcgagaagcggcagctgctgagcgccggcaaggtgcagggctacgacgggtactacgtactctcggtggagcagtaccccgagctggccgacagcgccaacaacatccagttcctgcggcagagcgagatcggcaggaggtaacgcccgggccgcgcccgccgagccgctcacgccctgcccacattgtcctgtggcacaacccgagtgggactctccaacgcccaagagccttcctcccgggggaatgagactgctgttacgacccacacccacaccgcgaaaacaaggaccgcttttttccgaatgaccttaaaggtgatcggctttaacgaatatgtttacatatgcatagcgctgcactcagtcggactgaacgtagccagaggaaaaaaaaatcatcaaggacaaaggcctcgacctgttgcgctgggccgtctgttccttctaggcactgtatttaactaacttta

SEQ ID NO: 552 - protein, 2725 aa, Homo sapiens; identical to SEQ ID NO: 486

SEQ ID NO: 553 - DNA, 943 bp, Homo sapiens
  CDS (2)..(940)
tatgaattgggtaaatgacagcatcatacaggagtttattctgctgggtttctcagatcgaccttggctggagtttccactccttgtggtcttcttgatttcttacactgtgaccatctttggcaatctgaccattattctagtgtcacgcctggacaccaaacttcatacccccatgtatttttttcttaccaatctatcactcctggatctttgttacaccacatgtacagtcccacaaatgctagtaaatttatgcagcatcaggaaagtaatcagttatcgtggctgtgtagcccagcttttcatatttctggccttgggggctactgaatatcttctcctggccgtcatgtcctttgattggtttgtagctatttgtcggcctctccattactcagttatcatgcaccagagactctgcctccagttggcagctgcatcctgggttactggttttagtaactcagtgtggttgtctaccctgactctccagctgccactctgtgacccctatgtgatagatcactttctctgtgaagtccctgcactgctcaagttatcttgtgttgagacaacagcaaatgaggctgaactattccttgtcagtgagctcttccatctaatacccctgacactcatccttatatcatatgcttttattgtccgagcagtattgaggatacagtctgctgaaggtcgacaaaaagcatttgggacatgtggttcccatctaattgtggtgtctcttttttatagtacagccgtctctgtgtacctgcaaccaccttcgcccagctccaaggaccaaggaaagatggtttctctcttctatggaatcattgcacccatgctgaatccccttatatatacacttaggaacaaggaggtaaaggaaggctttaaaaggttggttgcaagagtcttcttaatcaagaaataa

SEQ ID NO: 554 - protein, 313 aa, Homo sapiens
MNWVNDSIIQEFILLGFSDRPWLEFPLLVVFLISYTVTIFGNLTIILVSRLDTKLHTPMYFFLTNLSLLDLCYTTCTVPQMLVNLCSIRKVISYRGCVAQLFIFLALGATEYLLLAVMSFDWFVAICRPLHYSVIMHQRLCLQLAAASWVTGFSNSVWLSTLTLQLPLCDPYVIDHFLCEVPALLKLSCVETTANEAELFLVSELFHLIPLTLILISYAFIVRAVLRIQSAEGRQKAFGTCGSHLIVVSLFYSTAVSVYLQPPSPSSKDQGKMVSLFYGIIAPMLNPLIYTLRNKEVKEGFKRLVARVFLIKK

SEQ ID NO: 555 - DNA, 946 bp, Homo sapiens
  CDS (3)..(935)
attgggtaaatgacagcatcatacaggagtttattctgctgggtttctcagatcgaccttggctggagtttccactccttgtggtcttcttgatttcttacactgtgaccatctttggcaatctgaccattattctagtgtcacgcctggacaccaaacttcatacccccatgtatttttttcttaccaatctatcactcctggatctttgttacaccacatgtacagtcccacaaatgctagtaaatttatgcagcatcaggaaagtaatcagttatcgtggctgtgtagcccagcttttcatatttctggccttgggggctactgaatatcttctcctggccgtcatgtcctttgataggtttgtagctatttgtcggcctctccattactcagttatcatgcaccagagactctgcctccagttggcagctgcatcctgggttactggttttagtaactcagtgtggttgtctaccctgactctccagctgccactctgtgacccctatgtgatagatcactttctctgtgaagtccctgcactgctcaagttatcttgtgttgagacaacagcaaatgaggctgaactattccttgtcagtgagctcttccatctaatacccctgacactcatccttatatcatatgcttttattgtccgagcagtattgaggatacagtctgctgaaggtcgacaaaaagcatttgggacatgtggttcccatctaattgtggtgtctcttttttatagtacagccgtctctgtgtacctgcaaccaccttcgcccagctccaaggaccaaggaaagatggtttctctcttctatggaatcattgcacccatgctgaatccccttatatatacacttaggaacaaggaggtaaaggaaggctttaaaaggttggttgcaagagtcttcttaatcaagaaatagggattcgg

SEQ ID NO: 556 - protein, 311 aa, Homo sapiens
WVNDSIIQEFILLGFSDRPWLEFPLLVVFLISYTVTIFGNLTIILVSRLDTKLHTPMYFFLTNLSLLDLCYTTCTVPQMLVNLCSIRKVISYRGCVAQLFIFLALGATEYLLLAVMSFDRFVAICRPLHYSVIMHQRLCLQLAAASWVTGFSNSVWLSTLTLQLPLCDPYVIDHFLCEVPALLKLSCVETTANEAELFLVSELFHLIPLTLILISYAFIVRAVLRIQSAEGRQKAFGTCGSHLIVVSLFYSTAVSVYLQPPSPSSKDQGKMVSLFYGIIAPMLNPLIYTLRNKEVKEGFKRLVARVFLIKK

SEQ ID NO: 557 - DNA, 960 bp, Homo sapiens
  CDS (1)..(960)
cgcggatccaccatgaattgggtaaatgacagcatcatacaggagtttattttgctgggtttctcagatcgaccttggctggagtttccactccttgtggtcttcttgatttcttacactgtgaccatctttggcaatctgaccattattctagtgtcacgcctggacaccaaacttcatacccccatgtatttttttcttaccaatctatcactcctggatctttgttacaccacatgtacagtcccacaaatgctagtaaatttatgcagcatcaggaaagtaatcagttatcgtggctgtgtagcccagcttttcatatttctggccttgggggctactgaatatcttctcctggccgtcatgtcctttgataggtttgtagctatttgtcggcctctccattactcagttatcatgcaccagagactctgcctccagttggcagctgcatcctgggttactggttttagtaactcagtgtggttgtctaccctgactctccagctgccactctgtgacccctatgtgatagatcactttctctgtgaagtccctgcactgctcaagttatcttgtgttgagacaacagcaaatgaggctgaactattccttgtcagtgagctcttccatctaatacccctgacactcatccttatatcatatgcttttattgtccgagcagtattgaggatacagtctgctgaaggtcgacaaaaagcatttgggacatgtggttcccatctaattgtggtgtctcttttttatagtacagccgtctctgtgtacctgcaaccaccttcgcccagctccaaggaccaaggaaagatggtttctctcttctatggaatcattgcacccatgctgaatccccttatatatacacttaggaacaaggaggtaaaggaaggctttaaaaggttggttgcaagagtcttcttaatcaagaaactcgaggcg

SEQ ID NO: 558 - protein, 320 aa, Homo sapiens
RGSTMNWVNDSIIQEFILLGFSDRPWLEFPLLVVFLISYTVTIFGNLTIILVSRLDTKLHTPMYFFLTNLSLLDLCYTTCTVPQMLVNLCSIRKVISYRGCVAQLFIFLALGATEYLLLAVMSFDRFVAICRPLHYSVIMHQRLCLQLAAASWVTGFSNSVWLSTLTLQLPLCDPYVIDHFLCEVPALLKLSCVETTANEAELFLVSELFHLIPLTLILISYAFIVRAVLRIQSAEGRQKAFGTCGSHLIVVSLFYSTAVSVYLQPPSPSSKDQGKMVSLFYGIIAPMLNPLIYTLRNKEVKEGFKRLVARVFLIKKLEA

SEQ ID NO: 559 - DNA, 321 bp, Homo sapiens
  CDS (1)..(321)
cgcggatccaccatgaattgggtaaatgacagcatcatacaggagtttattctgctgggtttctcagatcgaccttggctggagtttccactccttgtggtcttcttgatttcttacactgtgaccatctttggcaatctgaccattattctagtgtcacgcctggacaccaaacttcatacccccatgtatttttttcttaccaatctatcactcctggatctttgttacaccacatgtacagtcccacaaatgctagtaaatttatgcagcatcaggaaagtaatcagttatcgtggctgtgtagcccagctcgaggcg

SEQ ID NO: 560 - protein, 107 aa, Homo sapiens
RGSTMNWVNDSIIQEFILLGFSDRPWLEFPLLVVFLISYTVTIFGNLTIILVSRLDTKLHTPMYFFLTNLSLLDLCYTTCTVPQMLVNLCSIRKVISYRGCVAQLEA

SEQ ID NO: 561 - DNA, 943 bp, Homo sapiens; identical to SEQ ID NO: 553
  CDS (2)..(940)

SEQ ID NO: 562 - protein, 313 aa, Homo sapiens; identical to SEQ ID NO: 554

SEQ ID NO: 563 - DNA, 993 bp, Homo sapiens
  CDS (15)..(953)
ttgaaacattaatcatgaattgggtaaatgacagcatcatacaggagtttattctgctgggtttctcagatcgaccttggctggagtttccactccttgtggtcttcttgatttcttacactgtgaccatctttggcaatctgaccattattctagtgtcacgcctggacaccaaacttcatacccccatgtatttttttcttaccaatctatcactcctggatctttgttacaccacatgtacagtcccacaaatgctagtaaatttatgcagcatcaggaaagtaatcagttatcgtggctgtgtagcccagcttttcatatttctggccttgggggctactgaatatcttctcctggccgtcatgtcctttgataggtttgtagctatttgtcggcctctccattactcagttatcatgcaccagagactctgcctccagttggcagctgcatcctgggttactggttttagtaactcagtgtggttgtctaccctgactctccagctgccactctgtgacccctatgtgatagatcactttctctgtgaagtccctgcactgctcaagttatcttgtgttgagacaacagcaaatgaggctgaactattccttgtcagtgagctcttccatctaatacccctgacactcatccttatatcatatgcttttattgtccgagcagtattgaggatacagtctgctgaaggtcgacaaaaagcatttgggacatgtggttcccatctaattgtggtgtctcttttttatagtacagccgtctctgtgtacctgcaaccaccttcgcccagctccaaggaccaaggaaagatggtttctctcttctatggaatcattgcacccatgctgaatccccttatatatacacttaggaacaaggaggtaaaggaaggctttaaaaggttggttgcaagagtcttcttaatcaagaaataagaaatatgcaaatgataagctttgctaaagacaaaat

SEQ ID NO: 564 - protein, 313 aa, Homo sapiens
MNWVNDSIIQEFILLGFSDRPWLEFPLLVVFLISYTVTIFGNLTIILVSRLDTKLHTPMYFFLTNLSLLDLCYTTCTVPQMLVNLCSIRKVISYRGCVAQLFIFLALGATEYLLLAVMSFDRFVAICRPLHYSVIMHQRLCLQLAAASWVTGFSNSVWLSTLTLQLPLCDPYVIDHFLCEVPALLKLSCVETTANEAELFLVSELFHLIPLTLILISYAFIVRAVLRIQSAEGRQKAFGTCGSHLIVVSLFYSTAVSVYLQPPSPSSKDQGKMVSLFYGIIAPMLNPLIYTLRNKEVKEGFKRLVARVFLIKK

SEQ ID NO: 565 - DNA, 60 bp, Homo sapiens
  CDS (1)..(60)
gacagcatcatacaggagtttattctgctgggtttctcagatcgaccttggctggagttt

SEQ ID NO: 566 - protein, 20 aa, Homo sapiens
DSIIQEFILLGFSDRPWLEF

SEQ ID NO: 567 - DNA, 60 bp, Homo sapiens
  CDS (1)..(60)
gaagtccctgcactgctcaagttatcttgtgttgagacaacagcaaatgaggctgaacta

SEQ ID NO: 568 - protein, 20 aa, Homo sapiens
EVPALLKLSCVETTANEAEL

SEQ ID NO: 569 - DNA, 946 bp, Homo sapiens; identical to SEQ ID NO: 555
  CDS (3)..(935)

SEQ ID NO: 570 - protein, 311 aa, Homo sapiens; identical to SEQ ID NO: 556

SEQ ID NO: 571 - DNA, 943 bp, Homo sapiens
  CDS (2)..(940)
tatgaattgggtaaatgacagcatcatacaggagtttattctgctgggtttctcagatcgaccttggctggagtttccactccttgtggtcttcttgatttcttacactgtgaccatctttggcaatctgaccattattctagtgtcacgcctggacaccaaacttcatacccccatgtatttttttcttaccaatctatcactcctggatctttgttacaccacatgtacagtcccacaaatgctagtaaatttatgcagcatcaggaaagtaatcagttatcgtggctgtgtagcccagcttttcatatttctggccttgggggctactgaatatcttctcctggccgtcatgtcctttgattggtttgtagctatttgtcggcctctccattactcagttatcatgcaccagagactctgcctccagttggcagctgcatcctgggttactggttttagtaactcagtgtggttgtctaccctgactctccagctgccactctgtgacccctatgtgatagatcactttctctgtgaagtccctgcactgctcaagttatcttgcgttgagacaacagcaaatgaggctgaactattccttgtcagtgagctcttccatctaatacccctgacactcatccttatatcatatgcttttattgtccgagcagtattgaggatacagtctgctgaaggtcgacaaaaagcatttgggacatgtggttcccatctaattgtggtgtctcttttttatagtacagccgtctctgtgtacctgcaaccaccttcgcccagctccaaggaccaaggaaagatggtttctctcttctatggaatcattgcacccatgctgaatccccttatatatacacttaggaacaaggaggtaaaggaaggctttaaaaggttggttgcaagagtcttcttaatcaagaaataa

SEQ ID NO: 572 - protein, 313 aa, Homo sapiens; identical to SEQ ID NO: 554

SEQ ID NO: 573 - DNA, 943 bp, Homo sapiens
  CDS (2)..(940)
tatgaattgggtaaatgacagcatcatacaggagtttattctgctgggtttctcagatcgaccttggctggagtttccactccttgtggtcttcttgatttcttacactgtgaccatctttggcaatctgaccattattctagtgtcacgcctggacaccaaacttcatacccccatgtatttttttcttaccaatctatcactcctggatctttgttacaccacatgtacagtcccacaaatgctagtaaatttatgcagcatcaggaaagtaatcagttatcgtggctgtgtagcccagcttttcatatttctggccttgggggctactgaatatcttctcctggccgtcatgtcctttgattggtttgtagctatttgtcggcctctccattactcagttatcatgcaccagagactctgcctccagttggcagctgcatcctgggttactggttttagtaactcagtgtggttgtctaccctgactctccagctgccactctgtgacccctatgtgatagatcactttctctgtgaagtccctgcactgctcaagttatcttgtgttgagacaacagcaaatgaggctgaactattccttgtcagtgagctcttccatctaatacccctgacactcatccttatatcatatgcttttattgtccgagcagtattgaggatacagtctgctgaaggtcgacaaaaagcatttgggacatgtggttcccatctaattgtggtgtctcttttttatggtacagccgtctctgtgtacctgcaaccaccttcgcccagctccaaggaccaaggaaagatggtttctctcttctatggaatcattgcacccatgctgaatccccttatatatacacttaggaacaaggaggtaaaggaaggctttaaaaggttggttgcaagagtcttcttaatcaagaaataa

SEQ ID NO: 574 - protein, 313 aa, Homo sapiens
MNWVNDSIIQEFILLGFSDRPWLEFPLLVVFLISYTVTIFGNLTIILVSRLDTKLHTPMYFFLTNLSLLDLCYTTCTVPQMLVNLCSIRKVISYRGCVAQLFIFLALGATEYLLLAVMSFDWFVAICRPLHYSVIMHQRLCLQLAAASWVTGFSNSVWLSTLTLQLPLCDPYVIDHFLCEVPALLKLSCVETTANEAELFLVSELFHLIPLTLILISYAFIVRAVLRIQSAEGRQKAFGTCGSHLIVVSLFYGTAVSVYLQPPSPSSKDQGKMVSLFYGIIAPMLNPLIYTLRNKEVKEGFKRLVARVFLIKK

SEQ ID NO: 575 - DNA, 943 bp, Homo sapiens
  CDS (2)..(940)
tatgaattgggtaaatgacagcatcatacaggagtttattctgctgggtttctcagatcgaccttggctggagtttccactccttgtggtcttcttgatttcttacactgtgaccatctttggcaatctgaccattattctagtgtcacgcctggacaccaaacttcatacccccatgtatttttttcttaccaatctatcactcctggatctttgttacaccacatgtacagtcccacaaatgctagtaaatttatgcagcatcaggaaagtaatcagttatcgtggctgtgtagcccagcttttcatatttctggccttgggggctactgaatatcttctcctggccgtcatgtcctttgattggtttgtagctatttgtcggcctctccattactcagttatcatgcaccagagactctgcctccagttggcagctgcatcctgggttactggttttagtaactcagtgtggttgtctaccctgactctccagctgccactctgtgacccctatgtgatagatcactttctctgtgaagtccctgcactgctcaagttatcttgtgttgagacaacagcaaatgaggctgaactattccttgtcagtgagctcttccatctaatacccctgacactcatccttatatcatatgcttttattgtccgagcagtattgaggatacagtctgctgaaggtcgacaaaaagcatttgggacatgtggttcccatctaattgtggtgtctcttttttatagtacagccgtctctgtgtacctgcaaccaccttcgcccagctccaaggaccgaggaaagatggtttctctcttctatggaatcattgcacccatgctgaatccccttatatatacacttaggaacaaggaggtaaaggaaggctttaaaaggttggttgcaagagtcttcttaatcaagaaataa

SEQ ID NO: 576 - protein, 313 aa, Homo sapiens
MNWVNDSIIQEFILLGFSDRPWLEFPLLVVFLISYTVTIFGNLTIILVSRLDTKLHTPMYFFLTNLSLLDLCYTTCTVPQMLVNLCSIRKVISYRGCVAQLFIFLALGATEYLLLAVMSFDWFVAICRPLHYSVIMHQRLCLQLAAASWVTGFSNSVWLSTLTLQLPLCDPYVIDHFLCEVPALLKLSCVETTANEAELFLVSELFHLIPLTLILISYAFIVRAVLRIQSAEGRQKAFGTCGSHLIVVSLFYSTAVSVYLQPPSPSSKDRGKMVSLFYGIIAPMLNPLIYTLRNKEVKEGFKRLVARVFLIKK

SEQ ID NO: 577 - DNA, 943 bp, Homo sapiens
  CDS (2)..(940)
tatgaattgggtaaatgacagcatcatacaggagtttattctgctgggtttctcagatcgaccttggctggagtttccactccttgtggtcttcttgatttcttacactgtgaccatctttggcaatctgaccattattctagtgtcacgcctggacaccaaacttcatacccccatgtatttttttcttaccaatctatcactcctggatctttgttacaccacatgtacagtcccacaaatgctagtaaatttatgcagcatcaggaaagtaatcagttatcgtggctgtgtagcccagcttttcatatttctggccttgggggctactgaatatcttctcctggccgtcatgtcctttgattggtttgtagctatttgtcggcctctccattactcagttatcatgcaccagagactctgcctccagttggcagctgcatcctgggttactggttttagtaactcagtgtggttgtctaccctgactctccagctgccactctgtgacccctatgtgatagatcactttctctgtgaagtccctgcactgctcaagttatcttgtgttgagacaacagcaaatgaggctgaactattccttgtcagtgagctcttccatctaatacccctgacactcatccttatatcatatgcttttattgtccgagcagtattgaggatacagtctgctgaaggtcgacaaaaagcatttgggacatgtggttcccatctaattgtggtgtctcttttttatagtacagccgtctctgtgtacctgcaaccaccttcgcccagctccaaggaccaaggaaagatggtttctctcttctatggaatcattgcacccatgctgaatccccttatatatacacttaggaacaaggaggtaaaggaaggctttaaagggttggttgcaagagtcttcttaatcaagaaataa

SEQ ID NO: 578 - protein, 313 aa, Homo sapiens
MNWVNDSIIQEFILLGFSDRPWLEFPLLVVFLISYTVTIFGNLTIILVSRLDTKLHTPMYFFLTNLSLLDLCYTTCTVPQMLVNLCSIRKVISYRGCVAQLFIFLALGATEYLLLAVMSFDWFVAICRPLHYSVIMHQRLCLQLAAASWVTGFSNSVWLSTLTLQLPLCDPYVIDHFLCEVPALLKLSCVETTANEAELFLVSELFHLIPLTLILISYAFIVRAVLRIQSAEGRQKAFGTCGSHLIVVSLFYSTAVSVYLQPPSPSSKDQGKMVSLFYGIIAPMLNPLIYTLRNKEVKEGFKGLVARVFLIKK

SEQ ID NO: 579 - DNA, 947 bp, Homo sapiens
tatggaaaacgataatacaagttctttcgaaggcttcatcctggtgggcttctctgatcgtccccacctagagctgatcgtctttgtggttgtcctcatcttttatctgctgactcttcttggcaacatgaccattgtcttgctttcagctctggattcccggctgcacacaccaatgtatttctttttggcaaacctctcattcctggacatgtgtttcaccacaggttccatccctcagatgctctacaacctttggggtccagataagaccatcagctatgtgggttgtgccatccagctgtactttgtcctggccctgggaggggtggagtgtgtcctcctggctgtcatggcatatgaccgctatgctgcagtctgcaaacccctgcactacaccatcatcatgcacccacgtctctgtggacagctggcttcagtggcatggctgagtggctttggcaattctctcataatggcaccccagacattgatgctaccccgctgtgggcacagacgagttgaccactttctctgtgagatgccagcactaattggtatggcctgtgtagacaccatgatgcttgaggcactggcttttgccctggcaatctttatcatcctggcaccactcatcctcattctcatttcttatggttacgttggaggaacagtgcttaggatcaagtcagctgctgggcgaaagaaagccttcaacacttgcagctcgcatctaattgttgtctctctcttctatggtacaatcatatacatgtacctccagccagcaaatacttattcccaggaccagggcaagtttcttacccttttctacacaattgtcactcccagtgttaaccccctgatctatacactaagaaacaaagatgttaaagaggccatgaagaaggtgctagggaaggggagtgcagaaatatagtaaggga

SEQ ID NO: 580 - protein, 312 aa, Homo sapiens
MENDNTSSFEGFILVGFSDRPHLELIVFVVVLIFYLLTLLGNMTIVLLSALDSRLHTPMYFFLANLSFLDMCFTTGSIPQMLYNLWGPDKTISYVGCAIQLYFVLALGGVECVLLAVMAYDRYAAVCKPLHYTIIMHPRLCGQLASVAWLSGFGNSLIMAPQTLMLPRCGHRRVDHFLCEMPALIGMACVDTMMLEALAFALAIFIVLAPLILILISYGYVGGTVLRIKSAAGRKKAFNTCSSHLIVVSLFYGTIIYMYLQPANTYSQDQGKFLTLFYTIVTPSVNPLIYTLRNKDVKEAMKKVLGKGSAEI

SEQ ID NO: 581 - DNA, 932 bp, Homo sapiens
  CDS (3)..(923)
atacaagttctttcgaaggcttcatcctggtgggcttctctgatcgtccccacctagagctgatcgtctttgtggttgtcctcatcttttatctgctgactcttcttggcaacatgaccattgtcttgctttcagctctggattcccggctgcacacaccaatgtatttctttttggcaaacctctcattcctggacatgtgtttcaccacaggttccatccctcagatgctctacaacctttggggtccagataagaccatcagctatgtgggttgtgccatccagctgtactttgtcctggccctgggaggggtggagtgtgtcctcctggctgtcatggcatatgaccgctatgctgcagtctgcaaacccctgcactacaccatcatcatgcacccacgtctctgtggacagctggcttcagtggcatggctgagtggctttggcaattctctcataatggcaccccagacattgatgctaccccgctgtgggcacagacgagttgaccactttctctgtgagatgccagcactaattggtatggcctgtgtagacaccatgatgcttgaggcactggcttttgccctggcaatctttatcatcctggcaccactcatcctcattctcatttcttatggttacgttggaggaacagtgcttaggatcaagtcagctgctgggcgaaagaaagccttcaacacttgcagctcgcatctaattgttgtctctctcttctatggtacaattatatacatgtacctccagccagcaaatacttattcccaggaccagggcaagtttcttacccttttctacacaattgtcactcccagtgttaaccccctgatctatacactaagaaacaaagatgttaaagaggccatgaagaaggtgctagggaaggggagtgcagaaatatagtaaggg

SEQ ID NO: 582 - protein, 307 aa, Homo sapiens
TSSFEGFILVGFSDRPHLELIVFVVVLIFYLLTLLGNMTIVLLSALDSRLHTPMYFFLANLSFLDMCFTTGSIPQMLYNLWGPDKTISYVGCAIQLYFVLALGGVECVLLAVMAYDRYAAVCKPLHYTIIMHPRLCGQLASVAWLSGFGNSLIMAPQTLMLPRCGHRRVDHFLCEMPALIGMACVDTMMLEALAFALAIFIILAPLILILISYGYVGGTVLRIKSAAGRKKAFNTCSSHLIVVSLFYGTIIYMYLQPANTYSQDQGKFLTLFYTIVTPSVNPLIYTLRNKDVKEAMKKVLGKGSAEI

SEQ ID NO: 583 - DNA, 693 bp, Homo sapiens
  CDS (1)..(693)
cgcggatccaccatgtacaagttctttcgaggcttcatcctggtgggcttctctgatcgtccccacctagagctgatcgtctttgtggttgtcctcatcttttatctgctgactcttcttggcaacatgaccattgtcttgctttcagctctggattcccggctgcacacaccaatgtatttctttttggcaaacctctcattcctggacatgtgtttcaccacaggttccatccctcagatgctctacaacctttggggtccagataagaccatcagctatgtgggttgtgccatccagctgtactttgtcctggccctgggaggggtggagtgtgtcctcctggctgtcatggcatatgaccgctatgctgcagtctgcaaacccctgcactacaccatcatcatgcacccacgtctctgtggacagctggtttcagtggcatggctgagtggctttggcaattctctcataatggcaccccagacattgatgctaccccgctgtgggcacagacgagttgaccactttctctgtgagatgccagcactaattggtatggcctgtgtagacaccatgatgcttgaggcactggcttttgccctggcaatctttatcatcctggcaccactcatcctcattctcatttcttatggttacgttggaggaacagtgcttaggatcctcgaggcg

SEQ ID NO: 584 - protein, 231 aa, Homo sapiens
RGSTMYKFFRGFILVGFSDRPHLELIVFVVVLIFYLLTLLGNMTIVLLSALDSRLHTPMYFFLANLSFLDMCFTTGSIPQMLYNLWGPDKTISYVGCAIQLYFVLALGGVECVLLAVMAYDRYAAVCKPLHYTIIMHPRLCGQLVSVAWLSGFGNSLIMAPQTLMLPRCGHRRVDHFLCEMPALIGMACVDTMMLEALAFALAIFIILAPLILILISYGYVGGTVLRILEA

SEQ ID NO: 585 - DNA, 609 bp, Homo sapiens
  CDS (1)..(609)
cgcggatccctcatcttttatctgctgactcttcttggcaacatgaccattgtcttgctttcagctctggattcccggctgcacacaccaatgtatttctttttggcaaacctctcattcctggacatgtgtttcaccacaggttccatccctcagatgctctacaacctttggggtccagataagaccatcagctatgtgggttgtgccatccagctgtactttgtcctggccctgggaggggtggagtgtgtcctcctggctgtcatggcatatgaccgctatgctgcagtctgcaaacccctgcactacaccatcatcatgcacccacgtctctgtggacagctggtttcagtggcatggctgagtggctttggcaattctctcataatggcaccccagacattgatgctaccccgctgtgggcacagacgagttgaccactttctctgtgagatgccagcactaattggtatggcctgtgtagacaccatgatgcttgaggcactggcttttgccctggcaatctttatcatcctggcaccactcatcctcattctcatttcttatggttacgttggaggaacagtgcttaggatcctcgaggcg

SEQ ID NO: 586 - protein, 203 aa, Homo sapiens
RGSLIFYLLTLLGNMTIVLLSALDSRLHTPMYFFLANLSFLDMCFTTGSIPQMLYNLWGPDKTISYVGCAIQLYFVLALGGVECVLLAVMAYDRYAAVCKPLHYTIIMHPRLCGQLVSVAWLSGFGNSLIMAPQTLMLPRCGHRRVDHFLCEMPALIGMACVDTMMLEALAFALAIFIILAPLILILISYGYVGGTVLRILEA

SEQ ID NO: 587 - DNA, 433 bp, Homo sapiens
  CDS (1)..(432)
cgcggatccgccatccagctgtactttgtcctggccctgggaggggtggagtgtgtcctcctggctgtcatggcatatgaccgctatgctgcagtctgcaaacccctgcactacaccatcatcatgcacccacgtctctgtggacagctggtttcagtggcatggctgagtggctttggcaattctctcataatggcaccccagacattgatgctaccccgctgtgggcacagacgagttgaccactttctctgtgagatgccagcactaattggtatggcctgtgtagacaccatgatgcttgaggcactggcttttgccctggcaatctttatcatcctggcaccactcatcctcattctcatttcttatggttacgttggaggaacagtgcttaggatcctcgaggcgaagggcgaattccagcacactg

SEQ ID NO: 588 - protein, 144 aa, Homo sapiens
RGSAIQLYFVLALGGVECVLLAVMAYDRYAAVCKPLHYTIIMHPRLCGQLVSVAWLSGFGNSLIMAPQTLMLPRCGHRRVDHFLCEMPALIGMACVDTMMLEALAFALAIFIILAPLILILISYGYVGGTVLRILEAKGEFQHT

SEQ ID NO: 589 - DNA, 953 bp, Homo sapiens
  CDS (1)..(933)
gaaaacgataatacaagttctttcgaaggcttcatcctggtgggcttctctgatcgtccccacctagagctgatcgtctttgtggttgtcctcatcttttatctgctgactcttcttggcaacatgaccattgtcttgctttcagctctggattcccggctgcacacaccaatgtatttctttttggcaaacctctcattcctggacatgtgtttcaccacaggttccatccctcagatgctctacaacctttggggtccagataagaccatcagctatgtgggttgtgccatccagctgtactttgtcctggccctgggaggggtggagtgtgtcctcctggctgtcatggcatatgaccgctatgctgcagtctgcaaacccctgcactacaccatcatcatgcacccacgtctctgtggacagctggcttcagtggcatggctgagtggctttggcaattctctcataatggcaccccagacattgatgctaccccgctgtgggcacagacgagttgaccactttctctgtgagatgccagcactaattggtatggcctgtgtagacaccatgatgcttgaggcactggcttttgccctggcaatctttatcatcctggcaccactcatcctcattctcatttcttatggttacgttggaggaacagtgcttaggatcaagtcagctgctgggcgaaagaaagccttcaacacttgcagctcgcatctaattgttgtctctctcttctatggtacaatcatatacatgtacctccagccagcaaatacttattcccaggaccagggcaagtttcttacccttttctacacaatcgtcactcccagtgttaaccccctgatctatacactaagaaacaaagatgttaaagaggccatgaagaaggtgctagggaaggggagtgcagaaatataggaattcggaagggcgaa

SEQ ID NO: 590 - protein, 311 aa, Homo sapiens
ENDNTSSFEGFILVGFSDRPHLELIVFVVVLIFYLLTLLGNMTIVLLSALDSRLHTPMYFFLANLSFLDMCFTTGSIPQMLYNLWGPDKTISYVGCAIQLYFVLALGGVECVLLAVMAYDRYAAVCKPLHYTIIMHPRLCGQLASVAWLSGFGNSLIMAPQTLMLPRCGHRRVDHFLCEMPALIGMACVDTMMLEALAFALAIFIILAPLILILISYGYVGGTVLRIKSAAGRKKAFNTCSSHLIVVSLFYGTIIYMYLQPANTYSQDQGKFLTLFYTIVTPSVNPLIYTLRNKDVKEAMKKVLGKGSAEI

SEQ ID NO: 591 - DNA, 945 bp, Homo sapiens
  CDS (1)..(936)
atggaaaacgataatacaagttctttcgaaggcttcatcctggtgggcttctctgatcgtccccacctagagctgatcgtctttgtggttgtcctcatcttttatctgctgactcttcttggcaacatgaccattgtcttgctttcagctctggattcccggctgcacacaccaatgtatttctttttggcaaacctctcattcctggacatgtgtttcaccacaggttccatccctcagatgctctacaacctttggggtccagataagaccatcagctatgtgggttgtgccatccagctgtactttgtcctggccctgggaggggtggagtgtgtcctcctggctgtcatggcatatgaccgctatgctgcagtctgcaaacccctgcactacaccatcatcatgcacccacgtctctgtggacagctggcttcagtggcatggctgagtggctttggcaattctctcataatggcaccccagacattgatgctaccccgctgtgggcacagacgagttgaccactttctctgtgagatgccagcactaattggtatggcctgtgtagacaccatgatgcttgaggcactggcttttgccctggcaatctttatcatcctggcaccactcatcctcattctcatttcttatggttacgttggaggaacagtgcttaggatcaagtcagctgctgggcgaaagaaagccttcaacacttgcagctcgcatctaattgttgtctctctcttctatggtacaatcatatacatgtacctccagccagcaaatacttattcccaggaccagggcaagtttcttacccttttctacacaattgtcactcccagtgttaaccccctgatctatacactaagaaacaaagatgttaaagaggccatgaagaaggtgctagggaaggggagtgcagaaatatagtaaggg

SEQ ID NO: 592 - protein, 312 aa, Homo sapiens [sequence omitted]

SEQ ID NO: 593 - DNA, 947 bp, Homo sapiens
  CDS (3)..(938)
gtatggaaaacgataatacaagttctttcgaaggcttcatcctggtgggcttctctgatcgtccccacctagagctgatcgtctttgtggttgtcctcatcttttatctgctgactcttcttggcaacatgaccattgtcttgctttcagctctggattcccggctgcacacaccaatgtatttctttttggcaaacctctcattcctggacatgtgtttcaccacaggttccatccctcagatgctctacaacctttggggtccagataagaccatcagctatgtgggttgtgccatccagctgtactttgtcctggccctgggaggggtggagtgtgtcctcctggctgtcatggcatatgaccgctatgctgcagtctgcaaacccctgcactacaccatcatcatgcacccacgtctctgtggacagctggcttcagtggcatggctgagtggctttggcaattctctcataatggcaccccagacattgatgctaccccgctgtgggcacagacgagttgaccactttctctgtgagatgccagcactaattggtatggcctgtgtagacaccatgatgcttgaggcactggcttttgccctggcaatctttatcatcctggcaccactcatcctcattctcatttcttatggttacgttggaggaacagtgcttaggatcaagtcagctgctgggcgaaagaaagccttcaacacttgcagctcgcatctaattgttgtctctctcttctatggtacaatcatatacatgtacctccagccagcaaatacttattcccaggaccagggcaagtttcttacccttttctacacaattgtcactcccagtgttaaccccctgatctatacactaagaaacaaagatgttaaagaggccatgaagaaggtgctagggaaggggagtgcagaaatatagtaaggg

SEQ ID NO: 594 - protein, 312 aa, Homo sapiens [sequence omitted]

SEQ ID NO: 595 - DNA, 63 bp, Homo sapiens
  CDS (1)..(63)
atggaaaacgataatacaagttctttcgaaggcttcatcctggtgggcttctctgatcgtccc

SEQ ID NO: 596 - protein, 21 aa, Homo sapiens
MENDNTSSFEGFILVGFSDRP

SEQ ID NO: 597 - DNA, 60 bp, Homo sapiens
  CDS (1)..(60)
acattgatgctaccccgctgtgggcacagacgagttgaccactttctctgtgagatgcca

SEQ ID NO: 598 - protein, 20 aa, Homo sapiens
TLMLPRCGHRRVDHFLCEMP

SEQ ID NO: 599 - DNA, 953 bp, Homo sapiens; identical to SEQ ID NO: 589
  CDS (1)..(933)

SEQ ID NO: 600 - protein, 311 aa, Homo sapiens; identical to SEQ ID NO: 590

SEQ ID NO: 601 - DNA, 932 bp, Homo sapiens
  CDS (3)..(923)
atacaagttctttcgaaggcttcatcctggtgggcttctctgatcgtccccacctagagctgaccgtctttgtggttgtcctcatcttttatctgctgactcttcttggcaacatgaccattgtcttgctttcagctctggattcccggctgcacacaccaatgtatttctttttggcaaacctctcattcctggacatgtgtttcaccacaggttccatccctcagatgctctacaacctttggggtccagataagaccatcagctatgtgggttgtgccatccagctgtactttgtcctggccctgggaggggtggagtgtgtcctcctggctgtcatggcatatgaccgctatgctgcagtctgcaaacccctgcactacaccatcatcatgcacccacgtctctgtggacagctggcttcagtggcatggctgagtggctttggcaattctctcataatggcaccccagacattgatgctaccccgctgtgggcacagacgagttgaccactttctctgtgagatgccagcactaattggtatggcctgtgtagacaccatgatgcttgaggcactggcttttgccctggcaatctttatcatcctggcaccactcatcctcattctcatttcttatggttacgttggaggaacagtgcttaggatcaagtcagctgctgggcgaaagaaagccttcaacacttgcagctcgcatctaattgttgtctctctcttctatggtacaattatatacatgtacctccagccagcaaatacttattcccaggaccagggcaagtttcttacccttttctacacaattgtcactcccagtgttaaccccctgatctatacactaagaaacaaagatgttaaagaggccatgaagaaggtgctagggaaggggagtgcagaaatatagtaaggg

SEQ ID NO: 602 - protein, 307 aa, Homo sapiens
TSSFEGFILVGFSDRPHLELTVFVVVLIFYLLTLLGNMTIVLLSALDSRLHTPMYFFLANLSFLDMCFTTGSIPQMLYNLWGPDKTISYVGCAIQLYFVLALGGVECVLLAVMAYDRYAAVCKPLHYTIIMHPRLCGQLASVAWLSGFGNSLIMAPQTLMLPRCGHRRVDHFLCEMPALIGMACVDTMMLEALAFALAIFIILAPLILILISYGYVGGTVLRIKSAAGRKKAFNTCSSHLIVVSLFYGTIIYMYLQPANTYSQDQGKFLTLFYTIVTPSVNPLIYTLRNKDVKEAMKKVLGKGSAEI

SEQ ID NO: 603 - DNA, 932 bp, Homo sapiens
  CDS (3)..(923)
atacaagttctttcgaaggcttcatcctggtgggcttctctgatcgtccccacctagagctgatcgtctttgtggttgtcctcatcttttatctgctgactcttcttggcaacatgaccattgccttgctttcagctctggattcccggctgcacacaccaatgtatttctttttggcaaacctctcattcctggacatgtgtttcaccacaggttccatccctcagatgctctacaacctttggggtccagataagaccatcagctatgtgggttgtgccatccagctgtactttgtcctggccctgggaggggtggagtgtgtcctcctggctgtcatggcatatgaccgctatgctgcagtctgcaaacccctgcactacaccatcatcatgcacccacgtctctgtggacagctggcttcagtggcatggctgagtggctttggcaattctctcataatggcaccccagacattgatgctaccccgctgtgggcacagacgagttgaccactttctctgtgagatgccagcactaattggtatggcctgtgtagacaccatgatgcttgaggcactggcttttgccctggcaatctttatcatcctggcaccactcatcctcattctcatttcttatggttacgttggaggaacagtgcttaggatcaagtcagctgctgggcgaaagaaagccttcaacacttgcagctcgcatctaattgttgtctctctcttctatggtacaattatatacatgtacctccagccagcaaatacttattcccaggaccagggcaagtttcttacccttttctacacaattgtcactcccagtgttaaccccctgatctatacactaagaaacaaagatgttaaagaggccatgaagaaggtgctagggaaggggagtgcagaaatatagtaaggg

SEQ ID NO: 604 - protein, 307 aa, Homo sapiens
TSSFEGFILVGFSDRPHLELIVFVVVLIFYLLTLLGNMTIALLSALDSRLHTPMYFFLANLSFLDMCFTTGSIPQMLYNLWGPDKTISYVGCAIQLYFVLALGGVECVLLAVMAYDRYAAVCKPLHYTIIMHPRLCGQLASVAWLSGFGNSLIMAPQTLMLPRCGHRRVDHFLCEMPALIGMACVDTMMLEALAFALAIFIILAPLILILISYGYVGGTVLRIKSAAGRKKAFNTCSSHLIVVSLFYGTIIYMYLQPANTYSQDQGKFLTLFYTIVTPSVNPLIYTLRNKDVKEAMKKVLGKGSAEI

SEQ ID NO: 605 - DNA, 932 bp, Homo sapiens
  CDS (3)..(923)
atacaagttctttcgaaggcttcatcctggtgggcttctctgatcgtccccacctagagctgatcgtctttgtggttgtcctcatcttttatctgctgactcttcttggcaacatgaccattgtcttgctttcagctctggattcccggctgcacacaccaatgtatttctttttggcaaacctctcattcctggacatgtgtttcaccacaggttccatccctcagatgctctacaacctttggggtccagacaagaccatcagctatgtgggttgtgccatccagctgtactttgtcctggccctgggaggggtggagtgtgtcctcctggctgtcatggcatatgaccgctatgctgcagtctgcaaacccctgcactacaccatcatcatgcacccacgtctctgtggacagctggcttcagtggcatggctgagtggctttggcaattctctcataatggcaccccagacattgatgctaccccgctgtgggcacagacgagttgaccactttctctgtgagatgccagcactaattggtatggcctgtgtagacaccatgatgcttgaggcactggcttttgccctggcaatctttatcatcctggcaccactcatcctcattctcatttcttatggttacgttggaggaacagtgcttaggatcaagtcagctgctgggcgaaagaaagccttcaacacttgcagctcgcatctaattgttgtctctctcttctatggtacaattatatacatgtacctccagccagcaaatacttattcccaggaccagggcaagtttcttacccttttctacacaattgtcactcccagtgttaaccccctgatctatacactaagaaacaaagatgttaaagaggccatgaagaaggtgctagggaaggggagtgcagaaatatagtaaggg

SEQ ID NO: 606 - protein, 307 aa, Homo sapiens; identical to SEQ ID NO: 582

SEQ ID NO: 607 - DNA, 932 bp, Homo sapiens
  CDS (3)..(923)
atacaagttctttcgaaggcttcatcctggtgggcttctctgatcgtccccacctagagctgatcgtctttgtggttgtcctcatcttttatctgctgactcttcttggcaacatgaccattgtcttgctttcagctctggattcccggctgcacacaccaatgtatttctttttggcaaacctctcattcctggacatgtgtttcaccacaggttccatccctcagatgctctacaacctttggggtccagataagaccatcagctatgtgggttgtgccacccagctgtactttgtcctggccctgggaggggtggagtgtgtcctcctggctgtcatggcatatgaccgctatgctgcagtctgcaaacccctgcactacaccatcatcatgcacccacgtctctgtggacagctggcttcagtggcatggctgagtggctttggcaattctctcataatggcaccccagacattgatgctaccccgctgtgggcacagacgagttgaccactttctctgtgagatgccagcactaattggtatggcctgtgtagacaccatgatgcttgaggcactggcttttgccctggcaatctttatcatcctggcaccactcatcctcattctcatttcttatggttacgttggaggaacagtgcttaggatcaagtcagctgctgggcgaaagaaagccttcaacacttgcagctcgcatctaattgttgtctctctcttctatggtacaattatatacatgtacctccagccagcaaatacttattcccaggaccagggcaagtttcttacccttttctacacaattgtcactcccagtgttaaccccctgatctatacactaagaaacaaagatgttaaagaggccatgaagaaggtgctagggaaggggagtgcagaaatatagtaaggg

SEQ ID NO: 608 - protein, 307 aa, Homo sapiens
TSSFEGFILVGFSDRPHLELIVFVVVLIFYLLTLLGNMTIVLLSALDSRLHTPMYFFLANLSFLDMCFTTGSIPQMLYNLWGPDKTISYVGCATQLYFVLALGGVECVLLAVMAYDRYAAVCKPLHYTIIMHPRLCGQLASVAWLSGFGNSLIMAPQTLMLPRCGHRRVDHFLCEMPALIGMACVDTMMLEALAFALAIFIILAPLILILISYGYVGGTVLRIKSAAGRKKAFNTCSSHLIVVSLFYGTIIYMYLQPANTYSQDQGKFLTLFYTIVTPSVNPLIYTLRNKDVKEAMKKVLGKGSAEI

SEQ ID NO: 609 - DNA, 932 bp, Homo sapiens
  CDS (3)..(923)
atacaagttctttcgaaggcttcatcctggtgggcttctctgatcgtccccacctagagctgatcgtctttgtggttgtcctcatcttttatctgctgactcttcttggcaacatgaccattgtcttgctttcagctctggattcccggctgcacacaccaatgtatttctttttggcaaacctctcattcctggacatgtgtttcaccacaggttccatccctcagatgctctacaacctttggggtccagataagaccatcagctatgtgggttgtgccatccagctgtactttgtcctggccctgggaggggtggagtgtgtcctcctggctatcatggcatatgaccgctatgctgcagtctgcaaacccctgcactacaccatcatcatgcacccacgtctctgtggacagctggcttcagtggcatggctgagtggctttggcaattctctcataatggcaccccagacattgatgctaccccgctgtgggcacagacgagttgaccactttctctgtgagatgccagcactaattggtatggcctgtgtagacaccatgatgcttgaggcactggcttttgccctggcaatctttatcatcctggcaccactcatcctcattctcatttcttatggttacgttggaggaacagtgcttaggatcaagtcagctgctgggcgaaagaaagccttcaacacttgcagctcgcatctaattgttgtctctctcttctatggtacaattatatacatgtacctccagccagcaaatacttattcccaggaccagggcaagtttcttacccttttctacacaattgtcactcccagtgttaaccccctgatctatacactaagaaacaaagatgttaaagaggccatgaagaaggtgctagggaaggggagtgcagaaatatagtaaggg

SEQ ID NO: 610 - protein, 307 aa, Homo sapiens
TSSFEGFILVGFSDRPHLELIVFVVVLIFYLLTLLGNMTIVLLSALDSRLHTPMYFFLANLSFLDMCFTTGSIPQMLYNLWGPDKTISYVGCAIQLYFVLALGGVECVLLAIMAYDRYAAVCKPLHYTIIMHPRLCGQLASVAWLSGFGNSLIMAPQTLMLPRCGHRRVDHFLCEMPALIGMACVDTMMLEALAFALAIFIILAPLILILISYGYVGGTVLRIKSAAGRKKAFNTCSSHLIVVSLFYGTIIYMYLQPANTYSQDQGKFLTLFYTIVTPSVNPLIYTLRNKDVKEAMKKVLGKGSAEI

SEQ ID NO: 611 - DNA, 932 bp, Homo sapiens
  CDS (3)..(923)
atacaagttctttcgaaggcttcatcctggtgggcttctctgatcgtccccacctagagctgatcgtctttgtggttgtcctcatcttttatctgctgactcttcttggcaacatgaccattgtcttgctttcagctctggattcccggctgcacacaccaatgtatttctttttggcaaacctctcattcctggacatgtgtttcaccacaggttccatccctcagatgctctacaacctttggggtccagataagaccatcagctatgtgggttgtgccatccagctgtactttgtcctggccctgggaggggtggagtgtgtcctcctggctgtcatggcatatgaccgctatgctgcagtctgcaaacccctgcactacaccatcatcatgcacccacgtctctgtggacggctggcttcagtggcatggctgagtggctttggcaattctctcataatggcaccccagacattgatgctaccccgctgtgggcacagacgagttgaccactttctctgtgagatgccagcactaattggtatggcctgtgtagacaccatgatgcttgaggcactggcttttgccctggcaatctttatcatcctggcaccactcatcctcattctcatttcttatggttacgttggaggaacagtgcttaggatcaagtcagctgctgggcgaaagaaagccttcaacacttgcagctcgcatctaattgttgtctctctcttctatggtacaattatatacatgtacctccagccagcaaatacttattcccaggaccagggcaagtttcttacccttttctacacaattgtcactcccagtgttaaccccctgatctatacactaagaaacaaagatgttaaagaggccatgaagaaggtgctagggaaggggagtgcagaaatatagtaaggg

SEQ ID NO: 612 - protein, 307 aa, Homo sapiens
TSSFEGFILVGFSDRPHLELIVFVVVLIFYLLTLLGNMTIVLLSALDSRLHTPMYFFLANLSFLDMCFTTGSIPQMLYNLWGPDKTISYVGCAIQLYFVLALGGVECVLLAVMAYDRYAAVCKPLHYTIIMHPRLCGRLASVAWLSGFGNSLIMAPQTLMLPRCGHRRVDHFLCEMPALIGMACVDTMMLEALAFALAIFIILAPLILILISYGYVGGTVLRIKSAAGRKKAFNTCSSHLIVVSLFYGTIIYMYLQPANTYSQDQGKFLTLFYTIVTPSVNPLIYTLRNKDVKEAMKKVLGKGSAEI

SEQ ID NO: 613 - DNA, 932 bp, Homo sapiens
  CDS (3)..(923)
atacaagttctttcgaaggcttcatcctggtgggcttctctgatcgtccccacctagagctgatcgtctttgtggttgtcctcatcttttatctgctgactcttcttggcaacatgaccattgtcttgctttcagctctggattcccggctgcacacaccaatgtatttctttttggcaaacctctcattcctggacatgtgtttcaccacaggttccatccctcagatgctctacaacctttggggtccagataagaccatcagctatgtgggttgtgccatccagctgtactttgtcctggccctgggaggggtggagtgtgtcctcctggctgtcatggcatatgaccgctatgctgcagtctgcaaacccctgcactacaccatcatcatgcacccacgtctctgtggacagctggtttcagtggcatggctgagtggctttggcaattctctcataatggcaccccagacattgatgctaccccgctgtgggcacagacgagttgaccactttctctgtgagatgccagcactaattggtatggcctgtgtagacaccatgatgcttgaggcactggcttttgccctggcaatctttatcatcctggcaccactcatcctcattctcatttcttatggttacgttggaggaacagtgcttaggatcaagtcagctgctgggcgaaagaaagccttcaacacttgcagctcgcatctaattgttgtctctctcttctatggtacaattatatacatgtacctccagccagcaaatacttattcccaggaccagggcaagtttcttacccttttctacacaattgtcactcccagtgttaaccccctgatctatacactaagaaacaaagatgttaaagaggccatgaagaaggtgctagggaaggggagtgcagaaatatagtaaggg

SEQ ID NO: 614 - protein, 307 aa, Homo sapiens
TSSFEGFILVGFSDRPHLELIVFVVVLIFYLLTLLGNMTIVLLSALDSRLHTPMYFFLANLSFLDMCFTTGSIPQMLYNLWGPDKTISYVGCAIQLYFVLALGGVECVLLAVMAYDRYAAVCKPLHYTIIMHPRLCGQLVSVAWLSGFGNSLIMAPQTLMLPRCGHRRVDHFLCEMPALIGMACVDTMMLEALAFALAIFIILAPLILILISYGYVGGTVLRIKSAAGRKKAFNTCSSHLIVVSLFYGTIIYMYLQPANTYSQDQGKFLTLFYTIVTPSVNPLIYTLRNKDVKEAMKKVLGKGSAEI

SEQ ID NO: 615 - DNA, 932 bp, Homo sapiens
  CDS (3)..(923)
atacaagttctttcgaaggcttcatcctggtgggcttctctgatcgtccccacctagagctgatcgtctttgtggttgtcctcatcttttatctgctgactcttcttggcaacatgaccattgtcttgctttcagctctggattcccggctgcacacaccaatgtatttctttttggcaaacctctcattcctggacatgtgtttcaccacaggttccatccctcagatgctctacaacctttggggtccagataagaccatcagctatgtgggttgtgccatccagctgtactttgtcctggccctgggaggggtggagtgtgtcctcctggctgtcatggcatatgaccgctatgctgcagtctgcaaacccctgcactacaccatcatcatgcacccacgtctctgtggacagctggcttcagtggcatggctgagtggctttggcaattctctcataatggcaccccagacattgatgctaccccgctgtgggcacagacgagttgaccactttctctgtgagatgccagcactaattggtatggcctgtgtagacaccatgatgcttgaggcactggcttttgccctggcaatctttatcatcctggcaccactcatcctcattctcatttcttatggttacgttggaggaacagtgcttaggatcaagtcagctgctgggcgaaagaaagcctccaacacttgcagctcgcatctaattgttgtctctctcttctatggtacaattatatacatgtacctccagccagcaaatacttattcccaggaccagggcaagtttcttacccttttctacacaattgtcactcccagtgttaaccccctgatctatacactaagaaacaaagatgttaaagaggccatgaagaaggtgctagggaaggggagtgcagaaatatagtaaggg

SEQ ID NO: 616 - protein, 307 aa, Homo sapiens
TSSFEGFILVGFSDRPHLELIVFVVVLIFYLLTLLGNMTIVLLSALDSRLHTPMYFFLANLSFLDMCFTTGSIPQMLYNLWGPDKTISYVGCAIQLYFVLALGGVECVLLAVMAYDRYAAVCKPLHYTIIMHPRLCGQLASVAWLSGFGNSLIMAPQTLMLPRCGHRRVDHFLCEMPALIGMACVDTMMLEALAFALAIFIILAPLILILISYGYVGGTVLRIKSAAGRKKASNTCSSHLIVVSLFYGTIIYMYLQPANTYSQDQGKFLTLFYTIVTPSVNPLIYTLRNKDVKEAMKKVLGKGSAEI

SEQ ID NO: 617 - DNA, 968 bp, Homo sapiens
  CDS (8)..(949)
tatatcaatgggagaagaaaaccaaacctttgtgtccaagtttatcttcctgggtctttcacaggacttgcagacccagatcctgctatttatccttttcctcatcatttatctgctgaccgtgcttggaaaccagctcatcatcattctcatcttcctggattctcgccttcacactcccatgtatttttttcttagaaatatctcctttgcagatctctgtttctctactagcattgtccctcaagtgttggttcacttcttggtaaagaggaaaaccatttctttttatgggtgtatgacacagataattgtctttcttctggttgggtgtacagagtgtgcgctgctggcagtgatgtcctatgaccggtatgtggctgtctgcaagcccctgtactactctaccatcatgacacaacgggtgtgtctctggctgtccttcaggtcctgggccagtggggcactagtgtctttagtagataccagctttactttccatcttccctactggggacagaatataatcaatcactacttttgtgaacctcctgccctcctgaagctggcttccatagacacttacagcacagaaatggccatcttttcaatgggcgtggtaatcctcctggcccctatctccctgattcttggttcttattggaatattatctccactgttatccagatgcagtctggggaagggagactcaaggctttttccacctgtggctcccatcttattgttgttgtcctcttctatgggtcaggaatattcacctacatgcgaccaaactccaagactacaaaagaactggataaaatgatatctgtgttctatacagcggtgactccaatgttgaaccccataatttatagcttgaggaacaaagatgtcaaaggggctctcaggaaactagttgggagaaagtgcttctctcataggcagtgacctctgagtctgacta

SEQ ID NO: 618 - protein, 314 aa, Homo sapiens
MGEENQTFVSKFIFLGLSQDLQTQILLFILFLIIYLLTVLGNQLIIILIFLDSRLHTPMYFFLRNISFADLCFSTSIVPQVLVHFLVKRKTISFYGCMTQIIVFLLVGCTECALLAVMSYDRYVAVCKPLYYSTIMTQRVCLWLSFRSWASGALVSLVDTSFTFHLPYWGQNIINHYFCEPPALLKLASIDTYSTEMAIFSMGVVILLAPISLILGSYWNIISTVIQMQSGEGRLKAFSTCGSHLIVVVLFYGSGIFTYMRPNSKTTKELDKMISVFYTAVTPMLNPIIYSLRNKDVKGALRKLVGRKCFSHRQ

SEQ ID NO: 619 - DNA, 840 bp, Homo sapiens
  CDS (42)..(809)
tcatcattctcatcttcctggattctcgccttcacactcccatgtatttttttcttagaaatctctcctttgcagatctctgtttctctactagcattgtccctcaagtgttggttcacttcttggtaaagaggaaaaccatttctttttatgggtgtatgacacagataattgtctttcttctggttgggtgtacagagtgtgcgctgctggcagtgatgtcctatgaccggtatgtggctgtctgcaagcccctgtactactctaccatcatgacacaacgggtgtgtctctggctgtccttcaggtcctgggccagtggggcactagtgtctttagtagataccagctttactttccatcttccctactggggacagaatataatcaatcactacttttgtgaacctcctgccctcctgaagctggcttccatagacacttacagcacagaaatggccatcttttcaatgggcgtggtaatcctcctggcccctgtctccctgattcttggttcttattggaatattatctccactgttatccagatgcagtctggggaagggagactcaaggctttttccacctgtggctcccatcttattgttgttgtcctcttctatgggtcaggaatattcacctacatgcgaccaaactccaagactacaaaagaactggataaaatgatatctgtgttctatacagcggtgactccaatgttgaaccccataatttatagcttgaggaacaaagatgtcaaaggggctctcaggaaactagttgggagaaagtgcttctctcataggcagtgacctctgagtctgacttttagagctatgg

SEQ ID NO: 620 - protein, 256 aa, Homo sapiens
MYFFLRNLSFADLCFSTSIVPQVLVHFLVKRKTISFYGCMTQIIVFLLVGCTECALLAVMSYDRYVAVCKPLYYSTIMTQRVCLWLSFRSWASGALVSLVDTSFTFHLPYWGQNIINHYFCEPPALLKLASIDTYSTEMAIFSMGVVILLAPVSLILGSYWNIISTVIQMQSGEGRLKAFSTCGSHLIVVVLFYGSGIFTYMRPNSKTTKELDKMISVFYTAVTPMLNPIIYSLRNKDVKGALRKLVGRKCFSHRQ

SEQ ID NO: 621 - DNA, 994 bp, Homo sapiens
  CDS (31)..(972)
tgccaaacaggtaaacaggcaaaaatatcaatgggagaagaaaaccaaacctttgtgtccaagtttatcttcctgggtctttcacaggacttgcagacccagatcctgctatttatccttttcctcatcatttatctgctgaccgtgcttggaaaccagctcatcatcattctcatcttcctggattctcgccttcacactcccatgtatttttttcttagaaatatctcctttgcagatctctgtttctctactagcattgtccctcaagtgttggttcacttcttggtaaagaggaaaaccatttctttttatgggtgtatgacacagataattgtctttcttctggttgggtgtacagagtgtgcgctgctggcagtgatgtcctatgaccggtatgtggctgtctgcaagcccctgtactactctaccatcatgacacaacgggtgtgtctctggctgtccttcaggtcctgggccagtggggcactagtgtctttagtagataccagctttactttccatcttccctactggggacagaatataatcaatcactacttttgtgaacctcctgccctcctgaagctggcttccatagacacttacagcacagaaatggccatcttttcaatgggcgtggtaatcctcctggcccctgtctccctgattcttggttcttattggaatattatctccactgttatccagatgcagtctggggaagggagactcaaggctttttccacctgtggctcccatcttattgttgttgtcctcttctatgggtcaggaatattcacctacatgcgaccaaactccaagactacaaaagaactggataaaatgatatctgtgttctatacagcggtgactccaatgttgaaccccataatttatagcttgaggaacaaagatgtcaaaggggctctcaggaaactagttgggagaaagtgcttctctcataggcagtgacctctgagtctgactttta

SEQ ID NO: 622 - protein, 314 aa, Homo sapiens
MGEENQTFVSKFIFLGLSQDLQTQILLFILFLIIYLLTVLGNQLIIILIFLDSRLHTPMYFFLRNISFADLCFSTSIVPQVLVHFLVKRKTISFYGCMTQIIVFLLVGCTECALLAVMSYDRYVAVCKPLYYSTIMTQRVCLWLSFRSWASGALVSLVDTSFTFHLPYWGQNIINHYFCEPPALLKLASIDTYSTEMAIFSMGVVILLAPVSLILGSYWNIISTVIQMQSGEGRLKAFSTCGSHLIVVVLFYGSGIFTYMRPNSKTTKELDKMISVFYTAVTPMLNPIIYSLRNKDVKGALRKLVGRKCFSHRQ

SEQ ID NO: 623 - DNA, 960 bp, Homo sapiens
  CDS (1)..(942)
atgggagaagaaaaccaaacctttgtgtccaagtttatcttcctgggtctttcacaggacttgcagacccagatcctgctatttatccttttcctcatcatttatctgctgaccgtgcttggaaaccagctcatcatcattctcatcttcctggattctcgccttcacactcccatgtatttttttcttagaaatatctcctttgcagatctctgtttctctactagcattgtccctcaagtgttggttcacttcttggtaaagaggaaaaccatttctttttatgggtgtatgacacagataattgtctttcttctggttgggtgtacagagtgtgcgctgctggcagtgatgtcctatgaccggtatgtggctgtctgcaagcccctgtactactctaccatcatgacacaacgggtgtgtctctggctgtccttcaggtcctgggccagtggggcactagtgtctttagtagataccagctttactttccatcttccctactggggacagaatataatcaatcactacttttgtgaacctcctgccctcctgaagctggcttccatagacacttacagcacagaaatggccatcttttcaatgggcgtggtaatcctcctggcccctatctccctgattcttggttcttattggaatattatctccactgttatccagatgcagtctggggaagggagactcaaggctttttccacctgtggctcccatcttattgttgttgtcctcttctatgggtcaggaatattcacctacatgcgaccaaactccaagactacaaaagaactggataaaatgatatctgtgttctatacagcggtgactccaatgttgaaccccataatttatagcttgaggaacaaagatgtcaaaggggctctcaggaaactagttgggagaaagtgcttctctcataggcagtgacctctgagtctgact

SEQ ID NO: 624 - protein, 314 aa, Homo sapiens; identical to SEQ ID NO: 618

SEQ ID NO: 625 - DNA, 995 bp, Homo sapiens
  CDS (31)..(972)
tgccaaacaggtaaacaggcaaaaatatcaatgggagaagaaaaccaaacctttgtgtccaagtttatcttcctgggtctttcacaggacttgcagacccagatcctgctatttatccttttcctcatcatttatctgctgaccgtgcttggaaaccagctcatcatcattctcatcttcctggattctcgccttcacactcccatgtatttttttcttagaaatctctcctttgcagatctctgtttctctactagcattgtccctcaagtgttggttcacttcttggtaaagaggaaaaccatttctttttatgggtgtatgacacagataattgtctttcttctggttgggtgtacagagtgtgcgctgctggccgtgatgtcctatgaccggtatgtggctgtctgcaagcccctgtactactctaccatcatgacacaacgggtgtgtctctggctgtccttcaggtcctgggccagtggggcactagtgtctttagtagataccagctttactttccatcttccctactggggacagaatataatcaatcactacttttgtgaacctcctgccctcctgaagctggcttccatagacacttacagcacagaaatggccatcttttcaatgggcgtggtaatcctcctggcccctatctccctgattcttggttcttattggaatattatctccactgttatccagatgcagtctggggaagggagactcaaggctttttccacctgtggctcccatcttattgttgttgtcctcttctatgggtcaggaatattcacctacatgcgaccaaactccaagactacaaaagaactggataaaatgatatctgtgttctatacagcggtgactccaatgttgaaccccataatttatagcttgaggaacaaagatgtcaaaggggctctcaggaaactagttgggagaaagtgcttctctcataggcagtgacctctgagtctgacttttaa

SEQ ID NO: 626 - protein, 314 aa, Homo sapiens
MGEENQTFVSKFIFLGLSQDLQTQILLFILFLIIYLLTVLGNQLIIILIFLDSRLHTPMYFFLRNLSFADLCFSTSIVPQVLVHFLVKRKTISFYGCMTQIIVFLLVGCTECALLAVMSYDRYVAVCKPLYYSTIMTQRVCLWLSFRSWASGALVSLVDTSFTFHLPYWGQNIINHYFCEPPALLKLASIDTYSTEMAIFSMGVVILLAPISLILGSYWNIISTVIQMQSGEGRLKAFSTCGSHLIVVVLFYGSGIFTYMRPNSKTTKELDKMISVFYTAVTPMLNPIIYSLRNKDVKGALRKLVGRKCFSHRQ

SEQ ID NO: 627 - DNA, 946 bp, Homo sapiens
  CDS (2)..(943)
tatgggagaagaaaaccaaacctttgtgtccaagtttatcttcctgggtctttcacaggacttgcagacccagatcctgctatttatccttttcctcatcatttatctgctgaccgtgcttggaaaccagctcatcatcattctcatcttcctggattctcgccttcacactcccatgtatttttttcttagaaatatctcctttgcagatctctgtttctctactagcattgtccctcaagtgttggttcacttcttggtaaagaggaaaaccatttctttttatgggtgtatgacacagataattgtctttcttctggttgggtgtacagagtgtgcgctgctggcagtgatgtcctatgaccggtatgtggctgtctgcaagcccctgtactactctaccatcatgacacaacgggtgtgtctctggctgtccttcaggtcctcggccagtggggcactagtgtctttagtagataccagctttactttccatcttccctactggggacagaatataatcaatcactacttttgtgaacctcctgccctcctgaagctggcttccatagacacttacagcacagaaatggccatcttttcaatgggcgtggtaatcctcctggcccctgtctccctgattcttggttcttattggaatattatctccactgttatccagatgcagtctggggaagggagactcaaggctttttccacctgtggctcccatcttattgttgttgtcctcttctatgggtcaggaatattcacctacatgcgaccaaactccaagactacaaaagaactggataaaatgatatctgtgttctatacagcggtgactccaatgttgaaccccataatttatagcttgaggaacaaagatgtcaaaggggctctcaggaaactagttgggagaaagtgcttctctcataggcagtga

SEQ ID NO: 628 - protein, 314 aa, Homo sapiens [sequence omitted]

SEQ ID NO: 629 - DNA, 962 bp, Homo sapiens
  CDS (2)..(943)
tatgggagaagaaaaccaaacctttgtgtccaagtttatcttcctgggtctttcacaggacttgcagacccagatcctgctatttatccttttcctcatcatttatctgctgaccgtgcttggaaaccagctcatcatcattctcatcttcctggattctcgccttcacactcccatgtatttttttcttagaaatatctcctttgcagatctctgtttctctactagcattgtccctcaagtgttggttcacttcttggtaaagaggaaaaccatttctttttatgggtgtatgacacagataattgtctttcttctggttgggtgtacagagtgtgcgctgctggcagtgatgtcctatgaccggtatgtggctgtctgcaagcccctgtactactctaccatcatgacacaacgggtgtgtctctggctgtccttcaggtcctgggccagtggggcactagtgtctttagtagataccagctttactttccatcttccctactggggacagaatataatcaatcactacttttgtgaacctcctgccctcctgaagctggcttccatagacacttacagcacagaaatggccatcttttcaatgggcgtggtaatcctcctggcccctatctccctgattcttggttcttattggaatattatctccactgttatccagatgcagtctggggaagggagactcaaggctttttccacctgtggctcccatcttattgttgttgtcctcttctatgggtcaggaatattcacctacatgcgaccaaactccaagactacaaaagaactggataaaatgatatctgtgttctatacagcggtgactccaatgttgaaccccataatttatagcttgaggaacaaagatgtcaaaggggctctcaggaaactagttgggagaaagtgcttctctcataggcagtgacctctgagtctgacta

SEQ ID NO: 630 - protein, 314 aa, Homo sapiens; identical to SEQ ID NO: 618

SEQ ID NO: 631 - DNA, 968 bp, Homo sapiens
  CDS (8)..(949)
tatatcaatgggagaagaaaaccaaacctttgtgtccaagtttatcttcctgggtctttcacaggacttgcagacccagatcctgctatttatccttttcctcatcatttatctgctgaccgtgcttggaaaccagctcatcatcattctcatcttcctggattctcgccttcacactcccatgtatttttttcttagaaatctctcctttgcagatctctgtttctctactagcattgtccctcaagtgttggttcacttcttggtaaagaggaaaaccatttctttttatgggtgtatgacacagataattgtctttcttctggttgggtgtacagagtgtgcgctgctggcagtgatgtcctatgaccggtatgtggctgtctgcaagcccctgtactactctaccatcatgacacaacgggtgtgtctctggctgtccttcaggtcctgggccagtggggcactagtgtctttagtagataccagctttactttccatcttccctactggggacagaatataatcaatcactacttttgtgaacctcctgccctcctgaagctggcttccatagacacttacagcacagaaatggccatcttttcaatgggcgtggtaatcctcctggcccctatctccctgattcttggttcttattggaatattatctccactgttatccagatgcagtctggggaagggagactcaaggctttttccacctgtggctcccatcttattgttgttgtcctcttctatgggtcaggaatattcacctacatgcgaccaaactccaagactacaaaagaactggataaaatgatatctgtgttctatacagcggtgactccaatgttgaaccccataatttatagcttgaggaacaaagatgtcaaaggggctctcaggaaactagttgggagaaagtgcttctctcataggcagtgacctctgagtctgacta

SEQ ID NO: 632 - protein, 314 aa, Homo sapiens; identical to SEQ ID NO: 626

SEQ ID NO: 633 - DNA, 968 bp, Homo sapiens
  CDS (8)..(949)
tatatcaatgggagaagaaaaccaaacctttgtgtccaagtttatcttcctgggtctttcacaggacttgcagacccagatcctgctatttatccttttcctcatcatttatctgctgaccgtgcttggaaaccagctcatcatcattctcatcttcctggattctcgccttcacactcccatgtatttttttcttagaaatatctcctttgcagatctctgtttctctactagcattgtccctcaagtgttggttcacttcttggtaaagaggaaaaccatttctttttatgggtgtatgacacagataattgtctttcttctggttgggtgtacagagtgtgcgctgctggccgtgatgtcctatgaccggtatgtggctgtctgcaagcccctgtactactctaccatcatgacacaacgggtgtgtctctggctgtccttcaggtcctgggccagtggggcactagtgtctttagtagataccagctttactttccatcttccctactggggacagaatataatcaatcactacttttgtgaacctcctgccctcctgaagctggcttccatagacacttacagcacagaaatggccatcttttcaatgggcgtggtaatcctcctggcccctatctccctgattcttggttcttattggaatattatctccactgttatccagatgcagtctggggaagggagactcaaggctttttccacctgtggctcccatcttattgttgttgtcctcttctatgggtcaggaatattcacctacatgcgaccaaactccaagactacaaaagaactggataaaatgatatctgtgttctatacagcggtgactccaatgttgaaccccataatttatagcttgaggaacaaagatgtcaaaggggctctcaggaaactagttgggagaaagtgcttctctcataggcagtgacctctgagtctgacta

SEQ ID NO: 634 - protein, 314 aa, Homo sapiens; identical to SEQ ID NO: 618

SEQ ID NO: 635 - DNA, 968 bp, Homo sapiens
  CDS (8)..(949)
tatatcaatgggagaagaaaaccaaacctttgtgtccaagtttatcttcctgggtctttcacaggacttgcagacccagatcctgctatttatccttttcctcatcatttatctgctgaccgtgcttggaaaccagctcatcatcattctcatcttcctggattctcgccttcacactcccatgtatttttttcttagaaatatctcctttgcagatctctgtttctctactagcattgtccctcaagtgttggttcacttcttggtaaagaggaaaaccatttctttttatgggtgtatgacacagataattgtctttcttctggttgggtgtacagagtgtgcgctgctggcagtgatgtcctatgaccagtatgtggctgtctgcaagcccctgtactactctaccatcatgacacaacgggtgtgtctctggctgtccttcaggtcctgggccagtggggcactagtgtctttagtagataccagctttactttccatcttccctactggggacagaatataatcaatcactacttttgtgaacctcctgccctcctgaagctggcttccatagacacttacagcacagaaatggccatcttttcaatgggcgtggtaatcctcctggcccctatctccctgattcttggttcttattggaatattatctccactgttatccagatgcagtctggggaagggagactcaaggctttttccacctgtggctcccatcttattgttgttgtcctcttctatgggtcaggaatattcacctacatgcgaccaaactccaagactacaaaagaactggataaaatgatatctgtgttctatacagcggtgactccaatgttgaaccccataatttatagcttgaggaacaaagatgtcaaaggggctctcaggaaactagttgggagaaagtgcttctctcataggcagtgacctctgagtctgacta

SEQ ID NO: 636 - protein, 314 aa, Homo sapiens
MGEENQTFVSKFIFLGLSQDLQTQILLFILFLIIYLLTVLGNQLIIILIFLDSRLHTPMYFFLRNISFADLCFSTSIVPQVLVHFLVKRKTISFYGCMTQIIVFLLVGCTECALLAVMSYDQYVAVCKPLYYSTIMTQRVCLWLSFRSWASGALVSLVDTSFTFHLPYWGQNIINHYFCEPPALLKLASIDTYSTEMAIFSMGVVILLAPISLILGSYWNIISTVIQMQSGEGRLKAFSTCGSHLIVVVLFYGSGIFTYMRPNSKTTKELDKMISVFYTAVTPMLNPIIYSLRNKDVKGALRKLVGRKCFSHRQ

SEQ ID NO: 637 - DNA, 968 bp, Homo sapiens
  CDS (8)..(949)
tatatcaatgggagaagaaaaccaaacctttgtgtccaagtttatcttcctgggtctttcacaggacttgcagacccagatcctgctatttatccttttcctcatcatttatctgctgaccgtgcttggaaaccagctcatcatcattctcatcttcctggattctcgccttcacactcccatgtatttttttcttagaaatatctcctttgcagatctctgtttctctactagcattgtccctcaagtgttggttcacttcttggtaaagaggaaaaccatttctttttatgggtgtatgacacagataattgtctttcttctggttgggtgtacagagtgtgcgctgctggcagtgatgtcctatgaccggtatgtggctgtctgcaagcccctgtactactctaccatcatgacacaatgggtgtgtctctggctgtccttcaggtcctgggccagtggggcactagtgtctttagtagataccagctttactttccatcttccctactggggacagaatataatcaatcactacttttgtgaacctcctgccctcctgaagctggcttccatagacacttacagcacagaaatggccatcttttcaatgggcgtggtaatcctcctggcccctatctccctgattcttggttcttattggaatattatctccactgttatccagatgcagtctggggaagggagactcaaggctttttccacctgtggctcccatcttattgttgttgtcctcttctatgggtcaggaatattcacctacatgcgaccaaactccaagactacaaaagaactggataaaatgatatctgtgttctatacagcggtgactccaatgttgaaccccataatttatagcttgaggaacaaagatgtcaaaggggctctcaggaaactagttgggagaaagtgcttctctcataggcagtgacctctgagtctgacta

SEQ ID NO: 638 - protein, 314 aa, Homo sapiens
MGEENQTFVSKFIFLGLSQDLQTQILLFILFLIIYLLTVLGNQLIIILIFLDSRLHTPMYFFLRNISFADLCFSTSIVPQVLVHFLVKRKTISFYGCMTQIIVFLLVGCTECALLAVMSYDRYVAVCKPLYYSTIMTQWVCLWLSFRSWASGALVSLVDTSFTFHLPYWGQNIINHYFCEPPALLKLASIDTYSTEMAIFSMGVVILLAPISLILGSYWNIISTVIQMQSGEGRLKAFSTCGSHLIVVVLFYGSGIFTYMRPNSKTTKELDKMISVFYTAVTPMLNPIIYSLRNKDVKGALRKLVGRKCFSHRQ

SEQ ID NO: 639 - DNA, 968 bp, Homo sapiens
  CDS (8)..(949)
tatatcaatgggagaagaaaaccaaacctttgtgtccaagtttatcttcctgggtctttcacaggacttgcagacccagatcctgctatttatccttttcctcatcatttatctgctgaccgtgcttggaaaccagctcatcatcattctcatcttcctggattctcgccttcacactcccatgtatttttttcttagaaatatctcctttgcagatctctgtttctctactagcattgtccctcaagtgttggttcacttcttggtaaagaggaaaaccatttctttttatgggtgtatgacacagataattgtctttcttctggttgggtgtacagagtgtgcgctgctggcagtgatgtcctatgaccggtatgtggctgtctgcaagcccctgtactactctaccatcatgacacaacgggtgtgtctctggctgtccttcaggtcctcggccagtggggcactagtgtctttagtagataccagctttactttccatcttccctactggggacagaatataatcaatcactacttttgtgaacctcctgccctcctgaagctggcttccatagacacttacagcacagaaatggccatcttttcaatgggcgtggtaatcctcctggcccctatctccctgattcttggttcttattggaatattatctccactgttatccagatgcagtctggggaagggagactcaaggctttttccacctgtggctcccatcttattgttgttgtcctcttctatgggtcaggaatattcacctacatgcgaccaaactccaagactacaaaagaactggataaaatgatatctgtgttctatacagcggtgactccaatgttgaaccccataatttatagcttgaggaacaaagatgtcaaaggggctctcaggaaactagttgggagaaagtgcttctctcataggcagtgacctctgagtctgacta

SEQ ID NO: 640 - protein, 314 aa, Homo sapiens
MGEENQTFVSKFIFLGLSQDLQTQILLFILFLIIYLLTVLGNQLIIILIFLDSRLHTPMYFFLRNISFADLCFSTSIVPQVLVHFLVKRKTISFYGCMTQIIVFLLVGCTECALLAVMSYDRYVAVCKPLYYSTIMTQRVCLWLSFRSSASGALVSLVDTSFTFHLPYWGQNIINHYFCEPPALLKLASIDTYSTEMAIFSMGVVILLAPISLILGSYWNIISTVIQMQSGEGRLKAFSTCGSHLIVVVLFYGSGIFTYMRPNSKTTKELDKMISVFYTAVTPMLNPIIYSLRNKDVKGALRKLVGRKCFSHRQ

SEQ ID NO: 641 - DNA, 968 bp, Homo sapiens
  CDS (8)..(949)
tatatcaatgggagaagaaaaccaaacctttgtgtccaagtttatcttcctgggtctttcacaggacttgcagacccagatcctgctatttatccttttcctcatcatttatctgctgaccgtgcttggaaaccagctcatcatcattctcatcttcctggattctcgccttcacactcccatgtatttttttcttagaaatatctcctttgcagatctctgtttctctactagcattgtccctcaagtgttggttcacttcttggtaaagaggaaaaccatttctttttatgggtgtatgacacagataattgtctttcttctggttgggtgtacagagtgtgcgctgctggcagtgatgtcctatgaccggtatgtggctgtctgcaagcccctgtactactctaccatcatgacacaacgggtgtgtctctggctgtccttcaggtcctgggccagtagggcactagtgtctttagtagataccagctttactttccatcttccctactggggacagaatataatcaatcactacttttgtgaacctcctgccctcctgaagctggcttccatagacacttacagcacagaaatggccatcttttcaatgggcgtggtaatcctcctggcccctatctccctgattcttggttcttattggaatattatctccactgttatccagatgcagtctggggaagggagactcaaggctttttccacctgtggctcccatcttattgttgttgtcctcttctatgggtcaggaatattcacctacatgcgaccaaactccaagactacaaaagaactggataaaatgatatctgtgttctatacagcggtgactccaatgttgaaccccataatttatagcttgaggaacaaagatgtcaaaggggctctcaggaaactagttgggagaaagtgcttctctcataggcagtgacctctgagtctgacta

SEQ ID NO: 642 - protein, 314 aa, Homo sapiens
MGEENQTFVSKFIFLGLSQDLQTQILLFILFLIIYLLTVLGNQLIIILIFLDSRLHTPMYFFLRNISFADLCFSTSIVPQVLVHFLVKRKTISFYGCMTQIIVFLLVGCTECALLAVMSYDRYVAVCKPLYYSTIMTQRVCLWLSFRSWASRALVSLVDTSFTFHLPYWGQNIINHYFCEPPALLKLASIDTYSTEMAIFSMGVVILLAPISLILGSYWNIISTVIQMQSGEGRLKAFSTCGSHLIVVVLFYGSGIFTYMRPNSKTTKELDKMISVFYTAVTPMLNPIIYSLRNKDVKGALRKLVGRKCFSHRQ

SEQ ID NO: 643 - DNA, 968 bp, Homo sapiens
  CDS (8)..(949)
tatatcaatgggagaagaaaaccaaacctttgtgtccaagtttatcttcctgggtctttcacaggacttgcagacccagatcctgctatttatccttttcctcatcatttatctgctgaccgtgcttggaaaccagctcatcatcattctcatcttcctggattctcgccttcacactcccatgtatttttttcttagaaatatctcctttgcagatctctgtttctctactagcattgtccctcaagtgttggttcacttcttggtaaagaggaaaaccatttctttttatgggtgtatgacacagataattgtctttcttctggttgggtgtacagagtgtgcgctgctggcagtgatgtcctatgaccggtatgtggctgtctgcaagcccctgtactactctaccatcatgacacaacgggtgtgtctctggctgtccttcaggtcctgggccagtggggcactagtgtctttagtagataccagctttactttccatcttccctactggggacagaatataatcaatcactacttttgtgaacctcctgccctcctgaagctggcttccatagacacttacggcacagaaatggccatcttttcaatgggcgtggtaatcctcctggcccctatctccctgattcttggttcttattggaatattatctccactgttatccagatgcagtctggggaagggagactcaaggctttttccacctgtggctcccatcttattgttgttgtcctcttctatgggtcaggaatattcacctacatgcgaccaaactccaagactacaaaagaactggataaaatgatatctgtgttctatacagcggtgactccaatgttgaaccccataatttatagcttgaggaacaaagatgtcaaaggggctctcaggaaactagttgggagaaagtgcttctctcataggcagtgacctctgagtctgacta

SEQ ID NO: 644 - protein, 314 aa, Homo sapiens
MGEENQTFVSKFIFLGLSQDLQTQILLFILFLIIYLLTVLGNQLIIILIFLDSRLHTPMYFFLRNISFADLCFSTSIVPQVLVHFLVKRKTISFYGCMTQIIVFLLVGCTECALLAVMSYDRYVAVCKPLYYSTIMTQRVCLWLSFRSWASGALVSLVDTSFTFHLPYWGQNIINHYFCEPPALLKLASIDTYGTEMAIFSMGVVILLAPISLILGSYWNIISTVIQMQSGEGRLKAFSTCGSHLIVVVLFYGSGIFTYMRPNSKTTKELDKMISVFYTAVTPMLNPIIYSLRNKDVKGALRKLVGRKCFSHRQ

SEQ ID NO: 645 - DNA, 968 bp, Homo sapiens
  CDS (8)..(949)
tatatcaatgggagaagaaaaccaaacctttgtgtccaagtttatcttcctgggtctttcacaggacttgcagacccagatcctgctatttatccttttcctcatcatttatctgctgaccgtgcttggaaaccagctcatcatcattctcatcttcctggattctcgccttcacactcccatgtatttttttcttagaaatatctcctttgcagatctctgtttctctactagcattgtccctcaagtgttggttcacttcttggtaaagaggaaaaccatttctttttatgggtgtatgacacagataattgtctttcttctggttgggtgtacagagtgtgcgctgctggcagtgatgtcctatgaccggtatgtggctgtctgcaagcccctgtactactctaccatcatgacacaacgggtgtgtctctggctgtccttcaggtcctgggccagtggggcactagtgtctttagtagataccagctttactttccatcttccctactggggacagaatataatcaatcactacttttgtgaacctcctgccctcctgaagctggcttccatagacacttacagcacagaaatggccatcttttcaatggacgtggtaatcctcctggcccctatctccctgattcttggttcttattggaatattatctccactgttatccagatgcagtctggggaagggagactcaaggctttttccacctgtggctcccatcttattgttgttgtcctcttctatgggtcaggaatattcacctacatgcgaccaaactccaagactacaaaagaactggataaaatgatatctgtgttctatacagcggtgactccaatgttgaaccccataatttatagcttgaggaacaaagatgtcaaaggggctctcaggaaactagttgggagaaagtgcttctctcataggcagtgacctctgagtctgacta

SEQ ID NO: 646 - protein, 314 aa, Homo sapiens
MGEENQTFVSKFIFLGLSQDLQTQILLFILFLIIYLLTVLGNQLIIILIFLDSRLHTPMYFFLRNISFADLCFSTSIVPQVLVHFLVKRKTISFYGCMTQIIVFLLVGCTECALLAVMSYDRYVAVCKPLYYSTIMTQRVCLWLSFRSWASGALVSLVDTSFTFHLPYWGQNIINHYFCEPPALLKLASIDTYSTEMAIFSMDVVILLAPISLILGSYWNIISTVIQMQSGEGRLKAFSTCGSHLIVVVLFYGSGIFTYMRPNSKTTKELDKMISVFYTAVTPMLNPIIYSLRNKDVKGALRKLVGRKCFSHRQ

SEQ ID NO: 647 - DNA, 968 bp, Homo sapiens
  CDS (8)..(949)
tatatcaatgggagaagaaaaccaaacctttgtgtccaagtttatcttcctgggtctttcacaggacttgcagacccagatcctgctatttatccttttcctcatcatttatctgctgaccgtgcttggaaaccagctcatcatcattctcatcttcctggattctcgccttcacactcccatgtatttttttcttagaaatatctcctttgcagatctctgtttctctactagcattgtccctcaagtgttggttcacttcttggtaaagaggaaaaccatttctttttatgggtgtatgacacagataattgtctttcttctggttgggtgtacagagtgtgcgctgctggcagtgatgtcctatgaccggtatgtggctgtctgcaagcccctgtactactctaccatcatgacacaacgggtgtgtctctggctgtccttcaggtcctgggccagtggggcactagtgtctttagtagataccagctttactttccatcttccctactggggacagaatataatcaatcactacttttgtgaacctcctgccctcctgaagctggcttccatagacacttacagcacagaaatggccatcttttcaatgggcgtggtaatcctcctggcccctgtctccctgattcttggttcttattggaatattatctccactgttatccagatgcagtctggggaagggagactcaaggctttttccacctgtggctcccatcttattgttgttgtcctcttctatgggtcaggaatattcacctacatgcgaccaaactccaagactacaaaagaactggataaaatgatatctgtgttctatacagcggtgactccaatgttgaaccccataatttatagcttgaggaacaaagatgtcaaaggggctctcaggaaactagttgggagaaagtgcttctctcataggcagtgacctctgagtctgacta

SEQ ID NO: 648 - protein, 314 aa, Homo sapiens; identical to SEQ ID NO: 622

SEQ ID NO: 649 - DNA, 968 bp, Homo sapiens
  CDS (8)..(949)
tatatcaatgggagaagaaaaccaaacctttgtgtccaagtttatcttcctgggtctttcacaggacttgcagacccagatcctgctatttatccttttcctcatcatttatctgctgaccgtgcttggaaaccagctcatcatcattctcatcttcctggattctcgccttcacactcccatgtatttttttcttagaaatatctcctttgcagatctctgtttctctactagcattgtccctcaagtgttggttcacttcttggtaaagaggaaaaccatttctttttatgggtgtatgacacagataattgtctttcttctggttgggtgtacagagtgtgcgctgctggcagtgatgtcctatgaccggtatgtggctgtctgcaagcccctgtactactctaccatcatgacacaacgggtgtgtctctggctgtccttcaggtcctgggccagtggggcactagtgtctttagtagataccagctttactttccatcttccctactggggacagaatataatcaatcactacttttgtgaacctcctgccctcctgaagctggcttccatagacacttacagcacagaaatggccatcttttcaatgggcgtggtaatcctcctggcccctatctccctgattcttggttcttattggaatattatctccaccgttatccagatgcagtctggggaagggagactcaaggctttttccacctgtggctcccatcttattgttgttgtcctcttctatgggtcaggaatattcacctacatgcgaccaaactccaagactacaaaagaactggataaaatgatatctgtgttctatacagcggtgactccaatgttgaaccccataatttatagcttgaggaacaaagatgtcaaaggggctctcaggaaactagttgggagaaagtgcttctctcataggcagtgacctctgagtctgacta

SEQ ID NO: 650 - protein, 314 aa, Homo sapiens; identical to SEQ ID NO: 618

SEQ ID NO: 651 - DNA, 968 bp, Homo sapiens
  CDS (8)..(949)
tatatcaatgggagaagaaaaccaaacctttgtgtccaagtttatcttcctgggtctttcacaggacttgcagacccagatcctgctatttatccttttcctcatcatttatctgctgaccgtgcttggaaaccagctcatcatcattctcatcttcctggattctcgccttcacactcccatgtatttttttcttagaaatatctcctttgcagatctctgtttctctactagcattgtccctcaagtgttggttcacttcttggtaaagaggaaaaccatttctttttatgggtgtatgacacagataattgtctttcttctggttgggtgtacagagtgtgcgctgctggcagtgatgtcctatgaccggtatgtggctgtctgcaagcccctgtactactctaccatcatgacacaacgggtgtgtctctggctgtccttcaggtcctgggccagtggggcactagtgtctttagtagataccagctttactttccatcttccctactggggacagaatataatcaatcactacttttgtgaacctcctgccctcctgaagctggcttccatagacacttacagcacagaaatggccatcttttcaatgggcgtggtaatcctcctggcccctatctccctgattcttggttcttattggaatattatctccactgttatccagatgcagtctggggaagggagactcaaggctttttccacctgtggctcccatcttattgttgttgtcctcttctatgggtcaggaatattcacctacatgcgaccaaactccaagactacaaaagaactggataaaatgatatctgtgttctatacggcggtgactccaatgttgaaccccataatttatagcttgaggaacaaagatgtcaaaggggctctcaggaaactagttgggagaaagtgcttctctcataggcagtgacctctgagtctgacta

SEQ ID NO: 652 - protein, 314 aa, Homo sapiens; identical to SEQ ID NO: 618

SEQ ID NO: 653 - DNA, 968 bp, Homo sapiens
  CDS (8)..(949)
tatatcaatgggagaagaaaaccaaacctttgtgtccaagtttatcttcctgggtctttcacaggacttgcagacccagatcctgctatttatccttttcctcatcatttatctgctgaccgtgcttggaaaccagctcatcatcattctcatcttcctggattctcgccttcacactcccatgtatttttttcttagaaatatctcctttgcagatctctgtttctctactagcattgtccctcaagtgttggttcacttcttggtaaagaggaaaaccatttctttttatgggtgtatgacacagataattgtctttcttctggttgggtgtacagagtgtgcgctgctggcagtgatgtcctatgaccggtatgtggctgtctgcaagcccctgtactactctaccatcatgacacaacgggtgtgtctctggctgtccttcaggtcctgggccagtggggcactagtgtctttagtagataccagctttactttccatcttccctactggggacagaatataatcaatcactacttttgtgaacctcctgccctcctgaagctggcttccatagacacttacagcacagaaatggccatcttttcaatgggcgtggtaatcctcctggcccctatctccctgattcttggttcttattggaatattatctccactgttatccagatgcagtctggggaagggagactcaaggctttttccacctgtggctcccatcttattgttgttgtcctcttctatgggtcaggaatattcacctacatgcgaccaaactccaagactacaaaagaactggataaaatgatatctgtgttctatacagcggtaactccaatgttgaaccccataatttatagcttgaggaacaaagatgtcaaaggggctctcaggaaactagttgggagaaagtgcttctctcataggcagtgacctctgagtctgacta

SEQ ID NO: 654 - protein, 314 aa, Homo sapiens; identical to SEQ ID NO: 618

SEQ ID NO: 655 - DNA, 968 bp, Homo sapiens
  CDS (8)..(949)
tatatcaatgggagaagaaaaccaaacctttgtgtccaagtttatcttcctgggtctttcacaggacttgcagacccagatcctgctatttatccttttcctcatcatttatctgctgaccgtgcttggaaaccagctcatcatcattctcatcttcctggattctcgccttcacactcccatgtatttttttcttagaaatatctcctttgcagatctctgtttctctactagcattgtccctcaagtgttggttcacttcttggtaaagaggaaaaccatttctttttatgggtgtatgacacagataattgtctttcttctggttgggtgtacagagtgtgcgctgctggcagtgatgtcctatgaccggtatgtggctgtctgcaagcccctgtactactctaccatcatgacacaacgggtgtgtctctggctgtccttcaggtcctgggccagtggggcactagtgtctttagtagataccagctttactttccatcttccctactggggacagaatataatcaatcactacttttgtgaacctcctgccctcctgaagctggcttccatagacacttacagcacagaaatggccatcttttcaatgggcgtggtaatcctcctggcccctatctccctgattcttggttcttattggaatattatctccactgttatccagatgcagtctggggaagggagactcaaggctttttccacctgtggctcccatcttattgttgttgtcctcttctatgggtcaggaatattcacctacatgcgaccaaactccaagactacaaaagaactggataaaatgatatctgtgttctatacagcggtgactccagtgttgaaccccataatttatagcttgaggaacaaagatgtcaaaggggctctcaggaaactagttgggagaaagtgcttctctcataggcagtgacctctgagtctgacta

SEQ ID NO: 656 - protein, 314 aa, Homo sapiens
MGEENQTFVSKFIFLGLSQDLQTQILLFILFLIIYLLTVLGNQLIIILIFLDSRLHTPMYFFLRNISFADLCFSTSIVPQVLVHFLVKRKTISFYGCMTQIIVFLLVGCTECALLAVMSYDRYVAVCKPLYYSTIMTQRVCLWLSFRSWASGALVSLVDTSFTFHLPYWGQNIINHYFCEPPALLKLASIDTYSTEMAIFSMGVVILLAPISLILGSYWNIISTVIQMQSGEGRLKAFSTCGSHLIVVVLFYGSGIFTYMRPNSKTTKELDKMISVFYTAVTPVLNPIIYSLRNKDVKGALRKLVGRKCFSHRQ

SEQ ID NO: 657 - DNA, 968 bp, Homo sapiens
  CDS (8)..(949)
tatatcaatgggagaagaaaaccaaacctttgtgtccaagtttatcttcctgggtctttcacaggacttgcagacccagatcctgctatttatccttttcctcatcatttatctgctgaccgtgcttggaaaccagctcatcatcattctcatcttcctggattctcgccttcacactcccatgtatttttttcttagaaatatctcctttgcagatctctgtttctctactagcattgtccctcaagtgttggttcacttcttggtaaagaggaaaaccatttctttttatgggtgtatgacacagataattgtctttcttctggttgggtgtacagagtgtgcgctgctggcagtgatgtcctatgaccggtatgtggctgtctgcaagcccctgtactactctaccatcatgacacaacgggtgtgtctctggctgtccttcaggtcctgggccagtggggcactagtgtctttagtagataccagctttactttccatcttccctactggggacagaatataatcaatcactacttttgtgaacctcctgccctcctgaagctggcttccatagacacttacagcacagaaatggccatcttttcaatgggcgtggtaatcctcctggcccctatctccctgattcttggttcttattggaatattatctccactgttatccagatgcagtctggggaagggagactcaaggctttttccacctgtggctcccatcttattgttgttgtcctcttctatgggtcaggaatattcacctacatgcgaccaaactccaagactacaaaagaactggataaaatgatatctgtgttctatacagcggtgactccaatgttgaaccccataatttatagcttgaagaacaaagatgtcaaaggggctctcaggaaactagttgggagaaagtgcttctctcataggcagtgacctctgagtctgacta

SEQ ID NO: 658 - protein, 314 aa, Homo sapiens
MGEENQTFVSKFIFLGLSQDLQTQILLFILFLIIYLLTVLGNQLIIILIFLDSRLHTPMYFFLRNISFADLCFSTSIVPQVLVHFLVKRKTISFYGCMTQIIVFLLVGCTECALLAVMSYDRYVAVCKPLYYSTIMTQRVCLWLSFRSWASGALVSLVDTSFTFHLPYWGQNIINHYFCEPPALLKLASIDTYSTEMAIFSMGVVILLAPISLILGSYWNIISTVIQMQSGEGRLKAFSTCGSHLIVVVLFYGSGIFTYMRPNSKTTKELDKMISVFYTAVTPMLNPIIYSLKNKDVKGALRKLVGRKCFSHRQ

SEQ ID NO: 659 - DNA, 1998 bp, Homo sapiens
  CDS (1)..(1968)
atgggcatttatggttcagtaccttatctcctggcccacaaactgggcagaactataggtattttctggctgaatgcctcggaaacactggtggagatcaatacagagcctgcagtagagtacacactgacccagatgggcccagttgctgctaaacaaaaggtcagatctcgcactcatgtgcactggatgtcagagagtggcatcattgatgtttttctgctgacaggacctacaccttctgatgtcttcaaacagtactcacaccttacaggtacacaagccatgccccctcttttctctttgggataccaccagtgccgctggaactatgaagatgagcaggatgtaaaagcagtggatgcagggtttgatgagcatgacattccttatgatgccatgtggctggacatagagcacactgagggcaagaggtacttcacctgggacaaaaacagattcccaaaccccaagaggatgcaagagctgctcaggagcaaaaagcgtaagcttgtggtcatcagtgatccccacatcaagattgatcctgactactcagtatatgtgaaggccaaagatcagggcttctttgtgaagaatcaggaaggggaagactttgaaggggtgtgttggccaggtctctcctcttacctggatttcaccaatcccaaggtcagagagtggtattcaagtctttttgctttccctgtttatcagggatctacggacatcctcttcctttggaatgacatgaatgagccttctgtctttagagggccagagcaaaccatgcagaagaatgccattcatcatggcaattgggagcacagagagctccacaacatctacggtttttatcatcaaatggctactgcagaaggactgataaaacgatctaaagggaaggagagaccctttgttcttacacgttctttctttgctggatcacaaaagtatggtggtgccgtgtggacaggcgacaacacagcagaatggagcaacttgaaaatttctatcccaatgttactcactctcagcattactgggatctctttttgcggagctgacataggcgggttcattgggaatccagagacagagctgctagtgcgttggtaccaggctggagcctaccagcccttcttccgtggccatgccaccatgaacaccaagcgacgagagccctggctctttggggaggaacacacccgactcatccgagaagccatcagagagcgctatggcctcctgccatattggtattctctgttctaccatgcacacgtggcttcccaacctgtcatgaggcctctgtgggtagagttccctgatgaactaaagacttttgatatggaagatgaatacatgctgggtagtgcattattggttcatccagtcacagaaccaaaagccaccacagttgatgtgtttcttccaggatcaaatgaggtatggtatgactataagacatttgctcattgggaaggagggtgtactgtaaagatcccagtagccttggacactattccagtgtttcagcgaggtggaagtgtgataccaataaagacaactgtaggaaaatccacaggctggatgactgaatcctcctatggactccgggttgctctaagcactaagggttcttcagtgggtgagttatatcttgatgatggccattcattccaatacctccaccagaagcaatttttgcacaggaagttttcattctgttccagtgttctgatcaattccagttttgctgaccagaggggtcattatcccagcaagtgtgtggtggagaagatcttggtcttaggcttcaggaaggagccatcttctgtgactacccactcatctggtgatggtaaagatcagcctgtggcttttacgtattgtgccaaaacatccatcctgagcctggagaagctctcactcaacattgccactgactgggaggtccgcatcatatgacaaagaactgcccctggtgatgtgagc

SEQ ID NO: 660 - protein, 656 aa, Homo sapiens
MGIYGSVPYLLAHKLGRTIGIFWLNASETLVEINTEPAVEYTLTQMGPVAAKQKVRSRTHVHWMSESGIIDVFLLTGPTPSDVFKQYSHLTGTQAMPPLFSLGYHQCRWNYEDEQDVKAVDAGFDEHDIPYDAMWLDIEHTEGKRYFTWDKNRFPNPKRMQELLRSKKRKLVVISDPHIKIDPDYSVYVKAKDQGFFVKNQEGEDFEGVCWPGLSSYLDFTNPKVREWYSSLFAFPVYQGSTDILFLWNDMNEPSVFRGPEQTMQKNAIHHGNWEHRELHNIYGFYHQMATAEGLIKRSKGKERPFVLTRSFFAGSQKYGGAVWTGDNTAEWSNLKISIPMLLTLSITGISFCGADIGGFIGNPETELLVRWYQAGAYQPFFRGHATMNTKRREPWLFGEEHTRLIREAIRERYGLLPYWYSLFYHAHVASQPVMRPLWVEFPDELKTFDMEDEYMLGSALLVHPVTEPKATTVDVFLPGSNEVWYDYKTFAHWEGGCTVKIPVALDTIPVFQRGGSVIPIKTTVGKSTGWMTESSYGLRVALSTKGSSVGELYLDDGHSFQYLHQKQFLHRKFSFCSSVLINSSFADQRGHYPSKCVVEKILVLGFRKEPSSVTTHSSGDGKDQPVAFTYCAKTSILSLEKLSLNIATDWEVRII

SEQ ID NO: 661 - DNA, 2001 bp, Homo sapiens
  CDS (1)..(1971)
atgggcatttatggttcagtaccttatctcctggcccacaaactgggcagaactataggtattttctggctgaatgcctcggaaacactggtggagatcaatacagagcctgcagtagagtacacactgacccagatgggcccagttgctgctaaacaaaaggtcagatctcgcactcatgtgcactggatgtcagagagtggcatcattgatgtttttctgctgacaggacctacaccttctgatgtcttcaaacagtactcacaccttacaggtattcaagccatgccccctcttttctctttgggataccaccagtgccgctggaactatgaagatgagcaggatgtaaaagcagtggatgcagggtttgatgagcatgacattccttatgatgccatgtggctggacatagagcacactgagggcaagaggtacttcacctgggacaaaaacagattcccaaaccccaagaggatgcaagagctgctcaggagcaaaaagcgtaaggtacttgtggtcatcagtgatccccacatcaagattgatcctgactactcagtatatgtgaaggccaaagatcagggcttctttgtgaagaatcaggaaggggaagactttgaaggggtgtgttggccaggtctctcctcttacctggatttcaccaatcccaaggtcagagagtggtattcaagtctttttgctttccctgtttatcagggatctacggacatcctcttcctttggaatgacatgaatgagccttctgtctttagagggccagagcaaaccatgcagaagaatgccattcatcatggcaattgggagcacagagagctccacaacatctacggtttttatcatcaaatggctactgcagaaggactgataaaacgatctaaagggaaggagagaccctttgttcttacacgttctttctttgctggatcacaaaagtatggtgccgtgtggacaggcgacaacacagcagaatggagcaacttgaaaatttctatcccaatgttactcactctcagcattactgggatctctttttgcggagctgacataggcgggttcattgggaatccagagacagagctgctagtgcgttggtaccaggctggagcctaccagcccttcttccgtggccatgccaccatgaacaccaagcgacgagagccctggctctttggggaggaacacacccgactcatccgagaagccatcagagagcgctatggcctcctgccatattggtattctctgttctaccatgcacacgtggcttcccaacctgtcatgaggaggcctctgtgggtagagttccctgatgaactaaagacttttgatatggaagatgaatacatgctgggtttagggagtgcattattggttcatccagtcacagaaccaaaagccaccacagttgatgtgtttcttccaggatcaaatgaggtatggtatgactataagacatttgctcattgggaaggagggtgtactgtaaagatcccagtagccttggacactattccagtgtttcagcgaggtggaagtgtgataccaataaagacaactgtaggaaaatccacaggctggatgactgaatcctcctatggactccgggttgctctaagcactggttcttcagtgggtgagttatatcttgatgatggccattcattccaatacctccaccagaagcaatttttgcacaggaagttttcattctgttccagtgttctgatcaattccagttttgctgaccagaggggtcattatcccagcaagtgtgtggtggagaagatcttggtcttaggcttcaggaaggagccatcttctgtgactacccactcatctgatggtaaagatcagcctgtggcttttacgtattgtgccaaaacatccatcctgagcctggagaagctctcactcaacattgccactgactgggaggtccgcatcatatgacaaagaactgcccctggtgatgtgagc

SEQ ID NO: 662 - protein, 657 aa, Homo sapiens
MGIYGSVPYLLAHKLGRTIGIFWLNASETLVEINTEPAVEYTLTQMGPVAAKQKVRSRTHVHWMSESGIIDVFLLTGPTPSDVFKQYSHLTGIQAMPPLFSLGYHQCRWNYEDEQDVKAVDAGFDEHDIPYDAMWLDIEHTEGKRYFTWDKNRFPNPKRMQELLRSKKRKVLVVISDPHIKIDPDYSVYVKAKDQGFFVKNQEGEDFEGVCWPGLSSYLDFTNPKVREWYSSLFAFPVYQGSTDILFLWNDMNEPSVFRGPEQTMQKNAIHHGNWEHRELHNIYGFYHQMATAEGLIKRSKGKERPFVLTRSFFAGSQKYGAVWTGDNTAEWSNLKISIPMLLTLSITGISFCGADIGGFIGNPETELLVRWYQAGAYQPFFRGHATMNTKRREPWLFGEEHTRLIREAIRERYGLLPYWYSLFYHAHVASQPVMRRPLWVEFPDELKTFDMEDEYMLGLGSALLVHPVTEPKATTVDVFLPGSNEVWYDYKTFAHWEGGCTVKIPVALDTIPVFQRGGSVIPIKTTVGKSTGWMTESSYGLRVALSTGSSVGELYLDDGHSFQYLHQKQFLHRKFSFCSSVLINSSFADQRGHYPSKCVVEKILVLGFRKEPSSVTTHSSDGKDQPVAFTYCAKTSILSLEKLSLNIATDWEVRII

SEQ ID NO: 663 - DNA, 3025 bp, Homo sapiens
  CDS (28)..(2928)
acaggtgcctgggggtcaggcttccgcatgcgggctgcagttgctggcattgccttccgcaggaggcgtcagaaacagtggctttccaagaagtccacctatcaggcattattggattcagtcacaacagatgaagacagcaccaggttccaaatcatcaatgaagcaagtaaggtgaggcgtcagaaacagtggctttccaagaagtccacctatcaggcattattggattcagtcacaacagatgaagacagcaccaggttccaaatcatcaatgaagcaagtaaggtgcctctcctggctgaaatttatggtatagaaggaaacattttcaggcttaaaattaatgaagagactcctctaaaacccagatttgaagttccggatgtcctcacaagcaagccaagcactgtaaggatttcatgctctggggacacaggcagtctgatattggcagatggaaaaggagacctgaagtgccatatcacagcaaacccattcaaggtagacttggtgtctgaagaagaggttgtgattagcataaattccctgggccaattatactttgagcatggcagggcccctagggtctctttctcggataaggttaatctcacgcttggtagcatatgggataagatcaagaaccttttctctaggcaaggatcaaaagacccagctgagggcgatggggcccagcctgaggaaacacccagggatggcgacaagccagaggagactcaggggaaggcagagaaagatgagccaggagcctgggaggagacattcaaaactcactctgacagcaagccgtatggcccttcttctattggtttggatttctccttgcatggatttgagcatctttatgggatcccacaacatgcagaatcacaccaacttaaaaatactggggatggagatgcttaccgtctttataacctggatgtctatggataccaaatatatgataaaatgggcatttatggttcagtaccttatctcctggcccacaaactgggcagaactataggtattttctggctgaatgcctcggaaacactggtggagatcaatacagagcctgcagggatagtcatctttggtcctgtctctttgatttatcaaagccagggagatacacctctaacaactcatgtgcactggatgtcagagagtggcatcattgatgtttttctgctgacaggacctacaccttctgatgtcttcaaacagtactcacaccttacaggtacacaagccatgccccctcttttctctttgggataccaccagtgccgctggaactatgaagatgagcaggatgtaaaagcagtggatgcagggtttgatgagcatgacattccttatgatgccatgtggctggacatagagcacactgagggcaagaggtacttcacctgggacaaaaacagattcccaaaccccaagaggatgcaagagctgctcaggagcaaaaagcgtaagcttgtggtcatcagtgatccccacatcaagattgaacctgactactcagtatatgtgaaggccaaagatcagggcttctttgtgaagaatcaggaaggggaagactttgaaggggtgtgttggccaggtatgaaatcatacctggatttcaccaatcccaaggtcagagagtggtattcaagtatgttcagttccaattgtgatggatctacggacatcctcttcctttggaatgacatgaatgagccttctgtctttagagggccagagcaaaccatgcagaagaatgccattcatcatggcaattgggagcacagagagctccacaacatctacggtttttatatggctactgcagaaggactgataaaacgatctaaagggaaggagagaccctttgttcttacacgttctttctttgctggatcacaaaagtatggtgccgtgtggacaggcgacaacacagcagaatggagcaacttgaaaatttctatcccaatgttactcactctcagcattactgggatctctttttgcggagctgacataggcgggttcattgggaatccagagacagagctgctagtgcgttggtaccaggctggagcctaccagcccttcttccgtggccatgccaccatgaacaccaagcgacgagagccctggctctttggggaggaacacacccgactcatccgagaagccatcagagagcgctatggcctcctgccatattggtattctctgttctaccatgcacacgtggcttcccaacctgtcatgaggcctctgtgggtagagttccctgatgaactaaagacttttgatatggaagatgaatacatgttagggagtgcattattggttcatccagtcacagaaccaaaagccaccacagttgatgtgtttcttccaggatcaaatgaggtagtctggtatgactataagacatttgctcattgggaaggagggtgtactgtaaagatcccagtactgttacagattccagtgtttcagcgaggtggaagtgtgataccaataaagacaactgtaggaaaatccacaggctggatgactgaatcctcctatggactccgggttgctctaagcactctccagggttcttcagtgggtgagttatatcttgatgatggccattcattccaatacctccaccagaagcaatttttgcacaggaagttttcattctgttccagtgttctggtggcctcctctccagtatctcaaggacacttacataccccactcagcatgacaaaagccctgcttttcactgtatcgtctccagccagcgtgaaaatgcggcttcactacagcccagagaaaagggccaggtttagtcattgtgccaaaacatccatcctgagcctggagaagctctcactcaacattgccactgactgggaggtccgcatcatatgacaaagaactgcccctggtgatgtgagcagggacctgcctgcccctttcaacctttcccctcaccttttttgagatttttgctgcaatctgtttg

SEQ ID NO: 664 - protein, 967 aa, Homo sapiens
MRAAVAGIAFRRRRQKQWLSKKSTYQALLDSVTTDEDSTRFQIINEASKVRRQKQWLSKKSTYQALLDSVTTDEDSTRFQIINEASKVPLLAEIYGIEGNIFRLKINEETPLKPRFEVPDVLTSKPSTVRISCSGDTGSLILADGKGDLKCHITANPFKVDLVSEEEVVISINSLGQLYFEHGRAPRVSFSDKVNLTLGSIWDKIKNLFSRQGSKDPAEGDGAQPEETPRDGDKPEETQGKAEKDEPGAWEETFKTHSDSKPYGPSSIGLDFSLHGFEHLYGIPQHAESHQLKNTGDGDAYRLYNLDVYGYQIYDKMGIYGSVPYLLAHKLGRTIGIFWLNASETLVEINTEPAGIVIFGPVSLIYQSQGDTPLTTHVHWMSESGIIDVFLLTGPTPSDVFKQYSHLTGTQAMPPLFSLGYHQCRWNYEDEQDVKAVDAGFDEHDIPYDAMWLDIEHTEGKRYFTWDKNRFPNPKRMQELLRSKKRKLVVISDPHIKIEPDYSVYVKAKDQGFFVKNQEGEDFEGVCWPGMKSYLDFTNPKVREWYSSMFSSNCDGSTDILFLWNDMNEPSVFRGPEQTMQKNAIHHGNWEHRELHNIYGFYMATAEGLIKRSKGKERPFVLTRSFFAGSQKYGAVWTGDNTAEWSNLKISIPMLLTLSITGISFCGADIGGFIGNPETELLVRWYQAGAYQPFFRGHATMNTKRREPWLFGEEHTRLIREAIRERYGLLPYWYSLFYHAHVASQPVMRPLWVEFPDELKTFDMEDEYMLGSALLVHPVTEPKATTVDVFLPGSNEVVWYDYKTFAHWEGGCTVKIPVLLQIPVFQRGGSVIPIKTTVGKSTGWMTESSYGLRVALSTLQGSSVGELYLDDGHSFQYLHQKQFLHRKFSFCSSVLVASSPVSQGHLHTPLSMTKALLFTVSSPASVKMRLHYSPEKRARFSHCAKTSILSLEKLSLNIATDWEVRII

SEQ ID NO: 665 - DNA, 4483 bp, Homo sapiens
  CDS (204)..(2945)
aacgctagtttgggcctgaaaaattccaggagcaagagtcaagatttgtcactccatgagaatctggaggggactcccttcccagaaacttgacgatgaagtactggttgtaattttagaaagacacccaatcggcttttttaaaagatcgcccagggcccttgtcctgagagctgggagctggtcggagtgacagagaagccatggaagcagcagtgaaagaggaaataagtgttgaagatgaagctgtagataaaaacattttcagagactgtaacaagatcgcattttacaggcgtcagaaacagtggctttccaagaagtccacctatcaggcattattggattcagtcacaacagatgaagacagcaccaggttccaaatcatcaatgaagcaagtaaggttcctctcctggctgaaatttatggtatagaaggaaacattttcaggcttaaaattaacgaagagactcctctaaaacccagatttgaagttccggatgtcctcacaagcaagccaagcactgtaaggctgatttcatgctctggggacacaggcagtctgatattggcagatggaaaaggagacctgaagtgccatatcacagcaaacccattcaaggtagacttggtgtctgaagaagaggttgtgattagcataaattccctgggccaattatactttgagcatctacagattcttcacaaacaaagagctgctaaagaaaatgaggaggagacatcagtggacacctctcaggaaaatcaagaagatctgggcctgtgggaagagaaatttggaaaatttgtggatatcaaagctaatggcccttcttctattggtttggatttctccttgcatggatttgagcatctttatgggatcccacaacatgcagaatcacaccaacttaaaaatactggtgatggagatgcttaccgtctttataacctggatgtctatggataccaaatatatgataaaatgggcatttatggttcagtaccttatctcctggcccacaaactgggcagaactataggtattttctggctgaatgcctcggaaacactggtggagatcaatacagagcctgcagtagagtacacactgacccagatgggcccagttgctgctaaacaaaaggtcagatctcgcactcatgtgcactggatgtcagagagtggcatcattgatgtttttctgctgacaggacctacaccttctgatgtcttcaaacagtactcacaccttacaggcacacaagccatgccccctcttttctctttgggataccaccagtgccgctggaactatgaagatgagcaggatgtaaaagcagtggatgcagggtttgatgagcatgacattccttatgatgccatgtggctggacatagagcacactgagggcaagaggtacttcacctgggacaaaaacagattcccaaaccccaagaggatgcaagagctgctcaggagcaaaaagcgtaagcttgtggtcatcagtgatccccacatcaagattgatcctgactactcagtatatgtgaaggccaaagatcagggcttctttgtgaagaatcaggaaggggaagactttgaaggggtgtgttggccaggtctctcctcttacctggatttcaccaatcccaaggtcagagagtggtattcaagtctttttgctttccctgtttatcagggatctacggacatcctcttcctttggaatgacatgaatgagccttctgtctttagagggccagagcaaaccatgcagaagaatgccattcatcatggcaattgggagcacagagagctccacaacatctacggtttttatcatcaaatggctactgcagaaggactgataaaacgatctaaagggaaggagagaccctttgttcttacacgttctttctttgctggatcacaaaagtatggtgccgtgtggacaggcgacaacacagcagaatggagcaacttgaaaatttctatcccaatgttactcactctcagcattactgggatctctttttgcggagctgacataggcgggttcattgggaatccagagacagagctgctagtgcgttggtaccaggctggagcctaccagcccttcttccgtggccatgccaccatgaacaccaagcgacgagagccctggctctttggggaggaacacacccgactcatccgagaagccatcagagagcgctatggcctcctgccatattggtattctctgttctaccatgcacacgtggcttcccaacctgtcatgaggcctctgtgggtagagttccctgatgaactaaagacttttgatatggaagatgaatacatgctggggagtgcattattggttcatccagtcacagaaccaaaagccaccacagttgatgtgtttcttccaggatcaaatgaggtctggtatgactataagacatttgctcattgggaaggagggtgtactgtaaagatcccagtagccttggacactattccagtgtttcagcgaggtggaagtgtgataccaataaagacaactgtaggaaaatccacaggctggatgactgaatcctcctatggactccgggttgctctaagcactaagggttcttcagtgggtgagttatatcttgatgatggccattcattccaatacctccaccagaagcaatttttgcacaggaagttttcattctgttccagtgttctgatcaatagttttgctgaccagaggggtcattatcccagcaagtgtgtggtggagaagatcttggtcttaggcttcaggaaggagccatcttctgtgactacccactcatctgatggtaaagatcagcctgtggcttttacgtattgtgccaaaacatccatcctgagcctggagaagctctcactcaacattgccactgactgggaggtccgcatcatatgacaaagaactgcccctggtgatgtgagcagggacctgcctgcccctttcaacctttcccctcaccttttttgagatttttgctgcaatctgtttgccttccctgaatcaaaataatctttcattcgtcaccattatactaatgaacaatagatttcatgtttcaaaatttcagattttacatgttaagatgtactaacaatattccttgtatcaaacatctccttttctccctgatacatagccctgagacatttatagcgttcaggagtcttctattgcttccattccttcagcagggctgcgtgggtctgttttaacgtgggccaagcctacctgggcagcccatttgccagggcttgcctcaggccatgcagcattggcgctctggctgcagcagctgagttgctcaaggccagtgtccaagtggacagcagcctctggtactccccccagttatcttccacccacatggactgggcagagcagccctcttctgtgtgcactgcatacgctgcagccgtgggagttattctcccctagagatcgacttggcagcacgaaggattcttttctctttcatgcttctcaggctcaatagtttctaattaatcttaaaatccatgtcttttacattgtttttttaattaagtgctgtttactaaccaaataatatttataacatgagtaagctataattaataacaatgaaataaatacccatgtacccaccactggacttcagaagtagaactcatgactgggactaggatgaggcaagggagaccctggccttgggcacaaaatgtaagggatgccaaaaaaatacagtaatcaaagtaagtaatatttcaatccaatatttttaaaaatcagaattaatgcaaaaaaaaccatgatgaacaaaatattaaaatttaaaataaagacaggattagtattactgagttttccttttgtcccaggctttaatatggcttggcatggggcagaacattacaacataccagtcgtgtcatggtgcccaaggctccacagacctcagtggctccctgctgcctgccacagcatctgttttagcagcctcgactcctcagcactcctcagcacacacctcttcttatcaggcttcctccacttagcaacttgctaacggccacctctgtgccttctgatccctgggcgccaatatcctcctgcccttaccatccttccaggcccaacttaaatcccactttcccatgaagcctaactgcgtgaacacccctacccccatacccattagcagtgattttgcccttccccgtaatgctgtcccacttataactgtgctctacttagcattctcagggatcataccttaatgttttcagtatgtctgcgttctcctactagattgtatgtccctcaagagcatgttctgtttctcttctgtctgacagagcactattatacctgactttcagtaactgttagctgtgattagttagctggtggatttaattgattaaaaaattacgattgaatgtaaaaaaaaa

SEQ ID NO: 666 - protein, 914 aa, Homo sapiens [sequence omitted]

SEQ ID NO: 667 - DNA, 3015 bp, Homo sapiens
  CDS (204)..(2945)
aacgctagtttgggcctgaaaaattccaggagcaagagtcaagatttgtcactccatgagaatctggaggggactcccttcccagaaacttgacgatgaagtactggttgtaattttagaaagacacccaatcggcttttttaaaagatcgcccagggcccttgtcctgagagctgggagctggtcggagtgacagagaagccatggaagcagcagtgaaagaggaaataagtgttgaagatgaagctgtagataaaaacattttcagagactgtaacaagatcgcattttacaggcgtcagaaacagtggctttccaagaagtccacctatcaggcattattggattcagtcacaacagatgaagacagcaccaggttccaaatcatcaatgaagcaagtaaggttcctctcctggctgaaatttatggtatagaaggaaacattttcaggcttaaaattaacgaagagactcctctaaaacccagatttgaagttccggatgtcctcacaagcaagccaagcactgtaaggctgatttcatgctctggggacacaggcagtctgatattggcagatggaaaaggagacctgaagtgccatatcacagcaaacccattcaaggtagacttggtgtctgaagaagaggttgtgattagcataaattccctgggccaattatactttgagcatctacagattcttcacaaacaaagagctgctaaagaaaatgaggaggagacatcagtggacacctctcaggaaaatcaagaagatctgggcctgtgggaagagaaatttggaaaatttgtggatatcaaagctaatggcccttcttctattggtttggatttctccttgcatggatttgagcatctttatgggatcccacaacatgcagaatcacaccaacttaaaaatactggtgatggagatgcttaccgtctttataacctggatgtctatggataccaaatatatgataaaatgggcatttatggttcagtaccttatctcctggcccacaaactgggcagaactataggtattttctggctgaatgcctcggaaacactggtggagatcaatacagagcctgcagtagagtacacactgacccagatgggcccagttgctgctaaacaaaaggtcggatctcgcactcatgtgcactggatgtcagagagtggcatcattgatgtttttctgctgacaggacctacaccttctgatgtcttcaaacagtactcacaccttacaggcacacaagccatgccccctcttttctctttgggataccaccagtgccgctggaactatgaagatgagcaggatgtaaaagcagtggatgcagggtttgatgagcatgacattccttatgatgccatgtggctggacatagagcacactgagggcaagaggtacttcacctgggacaaaaacagattcccaaaccccaagaggatgcaagagctgctcaggagcaaaaagcgtaagcttgtggtcatcagtgatccccacatcaagattgatcctgactactcagtatatgtgaaggccaaagatcagggcttctttgtgaagaatcaggaaggggaagactttgaaggggtgtgttggccaggtctctcctcttacctggatttcaccaatcccaaggtcagagagtggtattcaagtctttttgctttccctgtttatcagggatctacggacatcctcttcctttggaatgacatgaatgagccttctgtctttagagggccagagcaaaccatgcagaagaatgccattcatcatggcaattgggagcacagagagctccacaacatctacggtttttatcatcaaatggctactgcagaaggactgataaaacgatctaaagggaaggagagaccctttgttcttacacgttctttctttgctggatcacaaaagtatggtgccgtgtggacaggcgacaacacagcagaatggagcaacttgaaaatttctatcccaatgttactcactctcagcattactggggtctctttttgcggagctgacataggcgggttcattgggaatccagagacagagctgctagtgcgttggtaccaggctggagcctaccagcccttcttccgtggccatgccaccatgaacaccaagcgacgagagccctggctctttggggaggaacacacccgactcatccgagaagccatcagagagcgctatggcctcctgccatattggtattctctgttctaccatgcacacgtggcttcccaacctgtcatgaggcctctgtgggtagagttccctgatgaactaaagacttttgatatggaagatgaatacatgctggggagtgcattattggttcatccagtcacagaaccaaaagccaccacagttgatgtgtttcttccaggatcaaatgaggtctggtatgactataagacatttgctcattgggaaggagggtgtactgtaaagatcccagtagccttggacactattccagtgtttcagcgaggtggaagtgtgataccaataaagacaactgtaggaaaatccacaggctggatgactgaatcctcctatggactccgggttgctctaagcactaagggttcttcagtgggtgagttatatcttgatgatggccattcattccaatacctccaccagaagcaatttttgcacaggaagttttcattctgttccagtgttctgatcaatagttttgctgaccagaggggtcactatcccagcaagtgtgtggtggagaagatcttggtcttaggcttcaggaaggagccatcttctgtgactacccactcatctgatggtaaagatcagcctgtggcttttacgtattgtgccaaaacatccatcctgagcctggagaagctctcactcaacattgccactgactgggaggtccgcatcatatgacaaagaactgcccctggtgatgtgagcagggacctgcctgcccctttcaacctttcccctcaccttt

SEQ ID NO: 668 - protein, 914 aa, Homo sapiens
MEAAVKEEISVEDEAVDKNIFRDCNKIAFYRRQKQWLSKKSTYQALLDSVTTDEDSTRFQIINEASKVPLLAEIYGIEGNIFRLKINEETPLKPRFEVPDVLTSKPSTVRLISCSGDTGSLILADGKGDLKCHITANPFKVDLVSEEEVVISINSLGQLYFEHLQILHKQRAAKENEEETSVDTSQENQEDLGLWEEKFGKFVDIKANGPSSIGLDFSLHGFEHLYGIPQHAESHQLKNTGDGDAYRLYNLDVYGYQIYDKMGIYGSVPYLLAHKLGRTIGIFWLNASETLVEINTEPAVEYTLTQMGPVAAKQKVGSRTHVHWMSESGIIDVFLLTGPTPSDVFKQYSHLTGTQAMPPLFSLGYHQCRWNYEDEQDVKAVDAGFDEHDIPYDAMWLDIEHTEGKRYFTWDKNRFPNPKRMQELLRSKKRKLVVISDPHIKIDPDYSVYVKAKDQGFFVKNQEGEDFEGVCWPGLSSYLDFTNPKVREWYSSLFAFPVYQGSTDILFLWNDMNEPSVFRGPEQTMQKNAIHHGNWEHRELHNIYGFYHQMATAEGLIKRSKGKERPFVLTRSFFAGSQKYGAVWTGDNTAEWSNLKISIPMLLTLSITGVSFCGADIGGFIGNPETELLVRWYQAGAYQPFFRGHATMNTKRREPWLFGEEHTRLIREAIRERYGLLPYWYSLFYHAHVASQPVMRPLWVEFPDELKTFDMEDEYMLGSALLVHPVTEPKATTVDVFLPGSNEVWYDYKTFAHWEGGCTVKIPVALDTIPVFQRGGSVIPIKTTVGKSTGWMTESSYGLRVALSTKGSSVGELYLDDGHSFQYLHQKQFLHRKFSFCSSVLINSFADQRGHYPSKCVVEKILVLGFRKEPSSVTTHSSDGKDQPVAFTYCAKTSILSLEKLSLNIATDWEVRII

SEQ ID NO: 669 - DNA, 3102 bp, Homo sapiens
  CDS (103)..(2838)
tactggttgtaattttagaaagacacccaatcggcttttttaaaagatcgcccagggcccttgtcctgagagctgggagctggtcggagtgacagagaagccatggaagcagcagtgaaagaggaaataagtgttgaagatgaagctgtagataaaaacattttcagagactgtaacaagatcgcattttacaggcgtcagaaacagtggctttccaagaagtccacctatcgggcattattggattcagtcacaacagatgaagacagcaccaggttccaaatcatcaatgaagcaagtaaggttcctctcctggctgaaatttatggtatagaaggaaacattttcaggcttaaaattaacgaagagactcctctaaaacccagatttgaagttccggatgtcctcacaagcaagccaagcactgtaaggctgatttcatgctctggggacacaggcagtctgatattggcagatggaaaaggagacctgaagtgccatatcacagcaaacccattcaaggtagacttggtgtctgaagaagaggttgtgattagcataaattccctgggccaattatactttgagcatctacagattcttcacaaacaaagagctgctaaagaaaatgaggaggagacatcagtggacacctctcaggaaaatcaagaagatctgggcctgtgggaagagaaatttggaaaatttgtggatatcaaagctaatggcccttcttctattggtttggatttctccttgcatggatttgagcatctttatgggatcccacaacatgcagaatcacaccaacttaaaaatactggagatgcttaccgtctttataacctggatgtctatggataccaaatatatgataaaatgggcatttatggttcagtaccttatctcctggcccacaaactgggcagaactataggtattttctggctgaatgcctcggaaacactggtggagatcaatacagagcctgcagtagagtacacactgacccagatgggcccagttgctgctaaacaaaaggtcagatctcgcactcatgtgcactggatgtcagagagtggcatcattgatgtttttctgctgacaggacctacaccttctgatgtcttcaaacagtactcacaccttacaggtacgcaagccatgccccctcttttctctttgggataccaccagtgccgctggaactatgaagatgagcaggatgtaaaagcagtggatgcagggtttgatgagcatgacattccttatgatgccatgtggctggacatagagcacactgagggcaagaggtacttcacctgggacaaaaacagattcccaaaccccaagaggatgcaagagctgctcaggagcaaaaagcgtaagcttgtggtcatcagtgatccccacatcaagattgaacctgactactcagtatatgtgaaggccaaagatcagggcttctttgtgaagaatcaggaaggggaagactttgaaggggtgtgttggccaggtctctcctcttacctggatttcaccaatcccaaggtcagagagtggtattcaagtctttttgctttccctgtttatcagggatctacggacatcctcttcctttggaatgacatgaatgagccttctgtctttagagggccagagcaaaccatgcagaagaatgccattcatcatggcaattgggagcacagagagctccacaacatctacggtttttatcatcaaatggctactgcagaaggactgataaaacgatctaaagggaaggagagaccctttgttcttacacgttctttctttgctggatcacaaaagtatggtgccgtgtggacaggcgacaacacagcagaatggagcaacttgaaaatttctatcccaatgttactcactctcagcattactgggatctctttttgcggagctgacataggcgggttcattgggaatccagagacagagctgctagtgcgttggtaccaggctggagcctaccagcccttcttccgtggccatgccaccatgaacaccaagcgacgagagccctggctctttggggaggaacacacccgactcatccgagaagccatcagagagcgctatggcctcctgccatattggtattctctgttctaccatgcacacgtggcttcccaacctgtcatgaggcctctgtgggtagagttccctgatgaactaaagacttttgatatggaagatgaatacatgttagggagtgcattattggttcatccagtcacagaaccaaaagccaccacagttgatgtgtttcttccaggatcaaatgaggtatggtatgactataagacatttgctcattgggaaggagggtgtactgtaaagatcccagtagccttggacactattccagtgtttcagcgaggtggaagtgtgataccaataaagacaactgtaggaaaatccacaggctggatgactgaatcctcctatggactccgggttgctctaagcactcagggttcttcagtgggtgagttatatcttgatgatggccattcattccaatacctccaccagaagcaatttttgcacaggaagttttcattctgttccagtgttctgatcaatagttttgctgaccagaggggtcattatcccagcaagtgtgtggtggagaagatcttggtcttaggcttcaggaaggagccatcttctgtgactacccactcatctgatggtaaagatcagcctgtggcttttacgtattgtgccaaaacatccatcctgagcctggagaagctctcactcaacattgccactgactgggaggtccgcatcatatgacaaagaactgcccctggtgatgtgagcagggacctgcctgcccctttcaacctttcccctcaccttttttgagatttttgctgcaatctgtttgtcttccctgaatcaaaataatctttcattcgtcaccattatactaatgaacaatagatttcatgtttcaaaatttcagattttacatgttaagatgtactaacaatattccttgtatcaaacatctccttttctccctgatacatagccctgagacattatagcgtc

SEQ ID NO: 670 - protein, 912 aa, Homo sapiens
MEAAVKEEISVEDEAVDKNIFRDCNKIAFYRRQKQWLSKKSTYRALLDSVTTDEDSTRFQIINEASKVPLLAEIYGIEGNIFRLKINEETPLKPRFEVPDVLTSKPSTVRLISCSGDTGSLILADGKGDLKCHITANPFKVDLVSEEEVVISINSLGQLYFEHLQILHKQRAAKENEEETSVDTSQENQEDLGLWEEKFGKFVDIKANGPSSIGLDFSLHGFEHLYGIPQHAESHQLKNTGDAYRLYNLDVYGYQIYDKMGIYGSVPYLLAHKLGRTIGIFWLNASETLVEINTEPAVEYTLTQMGPVAAKQKVRSRTHVHWMSESGIIDVFLLTGPTPSDVFKQYSHLTGTQAMPPLFSLGYHQCRWNYEDEQDVKAVDAGFDEHDIPYDAMWLDIEHTEGKRYFTWDKNRFPNPKRMQELLRSKKRKLVVISDPHIKIEPDYSVYVKAKDQGFFVKNQEGEDFEGVCWPGLSSYLDFTNPKVREWYSSLFAFPVYQGSTDILFLWNDMNEPSVFRGPEQTMQKNAIHHGNWEHRELHNIYGFYHQMATAEGLIKRSKGKERPFVLTRSFFAGSQKYGAVWTGDNTAEWSNLKISIPMLLTLSITGISFCGADIGGFIGNPETELLVRWYQAGAYQPFFRGHATMNTKRREPWLFGEEHTRLIREAIRERYGLLPYWYSLFYHAHVASQPVMRPLWVEFPDELKTFDMEDEYMLGSALLVHPVTEPKATTVDVFLPGSNEVWYDYKTFAHWEGGCTVKIPVALDTIPVFQRGGSVIPIKTTVGKSTGWMTESSYGLRVALSTQGSSVGELYLDDGHSFQYLHQKQFLHRKFSFCSSVLINSFADQRGHYPSKCVVEKILVLGFRKEPSSVTTHSSDGKDQPVAFTYCAKTSILSLEKLSLNIATDWEVRII

SEQ ID NO: 671 - DNA, 2951 bp, Homo sapiens
  CDS (210)..(2687)
tactggttgtaattttagaaagacacccaatcggcttttttaaaagatcgcccagggcccttgtcctgagagctgggagctggtcggagtgacagagaagccatggaagcagcagtgaaagaggaaataagtgttgaagatgaagctgtagataaaaacattttcagagactgtaacaagatcgcattttacaggaagaaaagcgtattatgttaattctgaacaggcgtcagaaacagtggctttccaagaagtccacctatcgggcattattggattcagtcacaacagatgaagacagcaccaggttccaaatcatcaatgaagcaagtaaggttcctctcctggctgaaatttatggtatagaaggaaacattttcaggcttaaaattaacgaagagactcctctaaaacccagatttgaagttccggatgtcctcacaagcaagccaagcactgtaagagctgctaaagaaaatgaggaggagacatcagtggacacctctcaggaaaatcaagaagatctgggcctgtgggaagagaaatttggaaaatttgtggatatcacagctaatggcccttcttctattggtttggatttctccttgcatggatttgagcatctttatgggatcccacaacatgcagaatcacaccaacttaaaaatactggagatgcttaccgtctttataacctggatgtctatggataccaaatatatgataaaatgggcatttatggttcagtaccttatctcctggcccacaaactgggcagaactataggtattttctggctgaatgcctcggaaacactggtggagatcaatacagagcctgcagtagagtacacactgacccagatgggcccagttgctgctaaacaaaaggtcagatctcgcactcatgtgcactggatgtcagagagtggcatcattgatgtttttctgctgacaggacctacaccttctgatgtcttcaaacagtactcacaccttacaggtacgcaagccatgccccctcttttctctttgggataccaccagtgccgctggaactatgaagatgagcaggatgtaaaagcagtggatgcagggtttgatgagcatgacattccttatgatgccatgtggctggacatagagcacactgagggcaagaggtacttcacctgggacaaaaacagattcccaaaccccaagaggatgcaagagctgctcaggagcaaaaagcgtaagcttgtggtcatcagtgatccccacatcaagattgaacctgactactcagtatatgtgaaggccaaagatcagggcttctttgtgaagaatcaggaaggggaagactttgaaggggtgtgttggccaggtctctcctcttacctggatttcaccaatcccaaggtcagagagtggtattcaagtctttttgctttccctgtttatcagggatctacggacatcctcttcctttggaatgacatgaatgagccttctgtctttagagggccagagcaaaccatgcagaagaatgccattcatcatggcaattgggagcacagagagctccacaacatctacggtttttatcatcaaatggctactgcagaaggactgataaaacgatctaaagggaaggagagaccctttgttcttacacgttctttctttgctggatcacaaaagtatggtgccgtgtggacaggcgacaacacagcagaatggagcaacttgaaaatttctatcccaatgttactcactctcagcattactgggatctctttttgcggagctgacataggcgggttcattgggaatccagagacagagctgctagtgcgttggtaccaggctggagcctaccagcccttcttccgtggccatgccaccatgaacaccaagcgacgagagccctggctctttggggaggaacacacccgactcatccgagaagccatcagagagcgctatggcctcctgccatattggtattctctgttctaccatgcacacgtggcttcccaacctgtcatgaggcctctgtgggtagagttccctgatgaactaaagacttttgatatggaagatgaatacatgttagggagtgcattattggttcatccagtcacagaaccaaaagccaccacagttgatgtgtttcttccaggatcaaatgaggtatggtatgactataagacatttgctcattgggaaggagggtgtactgtaaagatcccagtagccttggacactattccagtgtttcagcgaggtggaagtgtgataccaataaagacaactgtaggaaaatccacaggctggatgactgaatcctcctatggactccgggttgctctaagcactcagggttcttcagtgggtgagttatatcttgatgatggccattcattccaatacctccaccagaagcaatttttgcacaggaagttttcattctgttccagtgttctgatcaatagttttgctgaccagaggggtcattatcccagcaagtgtgtggtggagaagatcttggtcttaggcttcaggaaggagccatcttctgtgactacccactcatctgatggtaaagatcagcctgtggcttttacgtattgtgccaaaacatccatcctgagcctggagaagctctcactcaacattgccactgactgggaggtccgcatcatatgacaaagaactgcccctggtgatgtgagcagggacctgcctgcccctttcaacctttcccctcaccttttttgagatttttgctgcaatctgtttgtcttccctgaatcaaaataatctttcattcgtcaccattatactaatgaacaatagatttcatgtttcaaaatttcagattttacatgttaagatgtactaacaatattccttgtatcaaacatctccttttctccctgatacatagccctgagacattatagcgtc

SEQ ID NO: 672 - protein, 826 aa, Homo sapiens
MLILNRRQKQWLSKKSTYRALLDSVTTDEDSTRFQIINEASKVPLLAEIYGIEGNIFRLKINEETPLKPRFEVPDVLTSKPSTVRAAKENEEETSVDTSQENQEDLGLWEEKFGKFVDITANGPSSIGLDFSLHGFEHLYGIPQHAESHQLKNTGDAYRLYNLDVYGYQIYDKMGIYGSVPYLLAHKLGRTIGIFWLNASETLVEINTEPAVEYTLTQMGPVAAKQKVRSRTHVHWMSESGIIDVFLLTGPTPSDVFKQYSHLTGTQAMPPLFSLGYHQCRWNYEDEQDVKAVDAGFDEHDIPYDAMWLDIEHTEGKRYFTWDKNRFPNPKRMQELLRSKKRKLVVISDPHIKIEPDYSVYVKAKDQGFFVKNQEGEDFEGVCWPGLSSYLDFTNPKVREWYSSLFAFPVYQGSTDILFLWNDMNEPSVFRGPEQTMQKNAIHHGNWEHRELHNIYGFYHQMATAEGLIKRSKGKERPFVLTRSFFAGSQKYGAVWTGDNTAEWSNLKISIPMLLTLSITGISFCGADIGGFIGNPETELLVRWYQAGAYQPFFRGHATMNTKRREPWLFGEEHTRLIREAIRERYGLLPYWYSLFYHAHVASQPVMRPLWVEFPDELKTFDMEDEYMLGSALLVHPVTEPKATTVDVFLPGSNEVWYDYKTFAHWEGGCTVKIPVALDTIPVFQRGGSVIPIKTTVGKSTGWMTESSYGLRVALSTQGSSVGELYLDDGHSFQYLHQKQFLHRKFSFCSSVLINSFADQRGHYPSKCVVEKILVLGFRKEPSSVTTHSSDGKDQPVAFTYCAKTSILSLEKLSLNIATDWEVRII

SEQ ID NO: 673 - DNA, 2001 bp, Homo sapiens
  CDS (1)..(1971)
atgggcatttatggttcagtaccttatctcctggcccacaaactgggcagaactataggtattttctggctgaatgcctcggaaacactggtggagatcaatacagagcctgcagtagagtacacactgacccagatgggcccagttgctgctaaacaaaaggtcagatctcgcactcatgtgcactggatgtcagagagtggcatcattgatgtttttctgctgacaggacctacaccttctgatgtcttcaaacagtactcacaccttacaggtattcaagccatgccccctcttttctctttgggataccaccagtgccgctggaactatgaagatgagcaggatgtaaaagcagtggatgcagggtttgatgagcatgacattccttatgatgccatgtggctggacatagagcacactgagggcaagaggtacttcacctgggacaaaaacagattcccaaaccccaagaggatgcaagagctgctcaggagcaaaaagcgtaaggtacttgtggtcatcagtgatccccacatcaagattgatcctgactactcagtatatgtgaaggccaaagatcagggcttctttgtgaagaatcaggaaggggaaggctttgaaggggtgtgttggccaggtctctcctcttacctggatttcaccaatcccaaggtcagagagtggtattcaagtctttttgctttccctgtttatcagggatctacggacatcctcttcctttggaatgacatgaatgagccttctgtctttagagggccagagcaaaccatgcagaagaatgccattcatcatggcaattgggagcacagagagctccacaacatctacggtttttatcatcaaatggctactgcagaaggactgataaaacgatctaaagggaaggagagaccctttgttcttacacgttctttctttgctggatcacaaaagtatggtgccgtgtggacaggcgacaacacagcagaatggagcaacttgaaaatttctatcccaatgttactcactctcagcattactgggatctctttttgcggagctgacataggcgggttcattgggaatccagagacagagctgctagtgcgttggtaccaggctggagcctaccagcccttcttccgtggccatgccaccatgaacaccaagcgacgagagccctggctctttggggaggaacacacccgactcatccgagaagccatcagagagcgctatggcctcctgccatattggtattctctgttctaccatgcacacgtggcttcccaacctgtcatgaggaggcctctgtgggtagagttccctgatgaactaaagacttttgatatggaagatgaatacatgctgggtttagggagtgcattattggttcatccagtcacagaaccaaaagccaccacagttgatgtgtttcttccaggatcaaatgaggtatggtatgactataagacatttgctcattgggaaggagggtgtactgtaaagatcccagtagccttggacactattccagtgtttcagcgaggtggaagtgtgataccaataaagacaactgtaggaaaatccacaggctggatgactgaatcctcctatggactccgggttgctctaagcactggttcttcagtgggtgagttatatcttgatgatggccattcattccaatacctccaccagaagcaatttttgcacaggaagttttcattctgttccagtgttctgatcaattccagttttgctgaccagaggggtcattatcccagcaagtgtgtggtggagaagatcttggtcttaggcttcaggaaggagccatcttctgtgactacccactcatctgatggtaaagatcagcctgtggcttttacgtattgtgccaaaacatccatcctgagcctggagaagctctcactcaacattgccactgactgggaggtccgcatcatatgacaaagaactgcccctggtgatgtgagc

SEQ ID NO: 674 - protein, 657 aa, Homo sapiens
MGIYGSVPYLLAHKLGRTIGIFWLNASETLVEINTEPAVEYTLTQMGPVAAKQKVRSRTHVHWMSESGIIDVFLLTGPTPSDVFKQYSHLTGIQAMPPLFSLGYHQCRWNYEDEQDVKAVDAGFDEHDIPYDAMWLDIEHTEGKRYFTWDKNRFPNPKRMQELLRSKKRKVLVVISDPHIKIDPDYSVYVKAKDQGFFVKNQEGEGFEGVCWPGLSSYLDFTNPKVREWYSSLFAFPVYQGSTDILFLWNDMNEPSVFRGPEQTMQKNAIHHGNWEHRELHNIYGFYHQMATAEGLIKRSKGKERPFVLTRSFFAGSQKYGAVWTGDNTAEWSNLKISIPMLLTLSITGISFCGADIGGFIGNPETELLVRWYQAGAYQPFFRGHATMNTKRREPWLFGEEHTRLIREAIRERYGLLPYWYSLFYHAHVASQPVMRRPLWVEFPDELKTFDMEDEYMLGLGSALLVHPVTEPKATTVDVFLPGSNEVWYDYKTFAHWEGGCTVKIPVALDTIPVFQRGGSVIPIKTTVGKSTGWMTESSYGLRVALSTGSSVGELYLDDGHSFQYLHQKQFLHRKFSFCSSVLINSSFADQRGHYPSKCVVEKILVLGFRKEPSSVTTHSSDGKDQPVAFTYCAKTSILSLEKLSLNIATDWEVRII

SEQ ID NO: 675 - DNA, 2001 bp, Homo sapiens
  CDS (1)..(1971)
atgggcatttatggttcagtaccttatctcctggcccacaaactgggcagaactataggtattttctggctgaatgcctcggaaacactggtggagatcaatacagagcctgcagtagagtacacactgacccagatgggcccagttgctgctaaacaaaaggtcagatctcgcactcatgtgcactggatgtcagagagtggcatcattgatgtttttctgctgacaggacctacaccttctgatgtcttcaaacagtactcacaccttacaggtattcaagccatgccccctcttttctctttgggataccaccagtgccgctggaactatgaagatgagcaggatgtaaaagcagtggatgcagggtttgatgagcatgacattccttatgatgccatgtggctggacatagagcacactgagggcaagaggtacttcacctgggacaaaaacagattcccaaaccccaagaggatgcaagagctgctcaggagcaaaaagcgtaaggtacttgtggtcatcagtgatccccacatcaagattgatcctgactactcagtatatgtgaaggccaaagatcagggcttctttgtgaagaatcaggaaggggaagactttgaaggggtgtgttggccaggtctctcctcttacctggatttcaccaatcccaaggtcagagagtggtattcaagtctttttgctttccctgtttatcagggatctacggacatcctcttcctttggaatgacatgaatgagccttctgtctttagagggccagagcaaaccatgcagaagaatgccattcatcatggcaattgggagcacagagagctccacaacatctacggtttttatcatcaaatggctactgcagaaggactgataaaacgatctaaagggaaggagagaccctttgttcttacacgttctttctttgctggatcacaaaagtatggtgccgtgtggacaggcgacaacacagcagaatggagcaacttgaaaatttctatcccaatgttactcactctcagcattactgggatctctttttgcggagctgacataggcgggttcattgggaatccagagacagagctgctagtgcgttggtaccaggctggagcctaccagcccttcttccgtggccatgccaccatgaacaccaagcgacgagagccctggctctttggggaggaacacacccgactcatccgagaagccatcagagagcgctatggcctcctgccatattggtattctctgttctaccatgcacacgtggcttcccaacctgtcatgaggaggcctctgtgggtagagttccctgatgaactaaagacttttgatatggaagatgaatacatgctgggtttagggagtgcattattggttcatccagtcacagaaccaaaagccaccacagttgatgtgtttcttccaggatcaaatgaggtatggtatgactataagacatttgctcattgggaaggagggtgtactgtaaagatcccagtagccttggacactattccagtgtttcagcgaggtggaagtgtgataccaataaagacaactgtaggaaaatccacaggctggatgactgaatcctcctatggactccgggttgctctaagcactggttcttcagtgggtgagttatatcttgatgatggccattcattccaatacctccaccagaagcaatttttgcacaggaagttttcattctgttccagtgttctgatcaattccagttctgctgaccagaggggtcattatcccagcaagtgtgtggtggagaagatcttggtcttaggcttcaggaaggagccatcttctgtgactacccactcatctgatggtaaagatcagcctgtggcttttacgtattgtgccaaaacatccatcctgagcctggagaagctctcactcaacattgccactgactgggaggtccgcatcatatgacaaagaactgcccctggtgatgtgagc

SEQ ID NO: 676 - protein, 657 aa, Homo sapiens
MGIYGSVPYLLAHKLGRTIGIFWLNASETLVEINTEPAVEYTLTQMGPVAAKQKVRSRTHVHWMSESGIIDVFLLTGPTPSDVFKQYSHLTGIQAMPPLFSLGYHQCRWNYEDEQDVKAVDAGFDEHDIPYDAMWLDIEHTEGKRYFTWDKNRFPNPKRMQELLRSKKRKVLVVISDPHIKIDPDYSVYVKAKDQGFFVKNQEGEDFEGVCWPGLSSYLDFTNPKVREWYSSLFAFPVYQGSTDILFLWNDMNEPSVFRGPEQTMQKNAIHHGNWEHRELHNIYGFYHQMATAEGLIKRSKGKERPFVLTRSFFAGSQKYGAVWTGDNTAEWSNLKISIPMLLTLSITGISFCGADIGGFIGNPETELLVRWYQAGAYQPFFRGHATMNTKRREPWLFGEEHTRLIREAIRERYGLLPYWYSLFYHAHVASQPVMRRPLWVEFPDELKTFDMEDEYMLGLGSALLVHPVTEPKATTVDVFLPGSNEVWYDYKTFAHWEGGCTVKIPVALDTIPVFQRGGSVIPIKTTVGKSTGWMTESSYGLRVALSTGSSVGELYLDDGHSFQYLHQKQFLHRKFSFCSSVLINSSSADQRGHYPSKCVVEKILVLGFRKEPSSVTTHSSDGKDQPVAFTYCAKTSILSLEKLSLNIATDWEVRII

SEQ ID NO: 677 - DNA, 2001 bp, Homo sapiens
  CDS (1)..(1971)
atgggcatttatggttcagtaccttatctcctggcccacaaactgggcagaactataggtattttctggctgaatgcctcggaaacactggtggagatcaatacagagcctgcagtagagtacacactgacccagatgggcccagttgctgctaaacaaaaggtcagatctcgcactcatgtgcactggatgtcagagagtggcatcattgatgtttttctgctgacaggacctacaccttctgatgtcttcaaacagtactcacaccttacaggtattcaagccatgccccctcttttctctttgggataccaccagtgccgctggaactatgaagatgagcaggatgtaaaagcagtggatgcagggtttgatgagcatgacattccttatgatgccatgtggctggacatagagcacactgagggcaagaggtacttcacctgggacaaaaacagattcccaaaccccaagaggatgcaagagctgctcaggagcaaaaagcgtaaggtacttgtggtcatcagtgatccccacatcaagattgatcctgactactcagtatatgtgaaggccaaagatcagggcttctttgtgaagaatcaggaaggggaagactttgaaggggtgtgttggccaggtctctcctcttacctggatttcaccaatcccaaggtcagagagtggtattcaagtctttttgctttccctgtttatcagggatctacggacatcctcttcctttggaatgacatgaatgagccttctgtctttagagggccagagcaaaccatgcagaagaatgccattcatcatggcaattgggagcacagagagctccacaacatctacggtttttatcatcaaatggctactgcagaaggactgataaaacgatctaaagggaaggagagaccctttgttcttacacgttctttctttgctggatcacaaaagtatggtgccgtgtggacaggcgacaacacagcagaatggagcaacttgaaaatttctatcccaatgttactcactctcagcattactgggatctctttttgcggagctgacataggcgggttcattgggaatccagagacagagctgctagtgcgttggtaccaggctggagcctaccagcccttcttccgtggccatgccaccatgaacaccaagcgacgagagccctggctctttggggaggaacacacccgactcatccgagaagccatcagagagcgctatggcctcctgccatattggtattctctgttctaccatgcacacgtggcttcccaacctgtcatgaggaggcctctgtgggtagagttccctgatgaactaaagacttttgatatggaagatgaatacatgctgggtttagggagtgcattattggttcatccagtcacagaaccaaaagccaccacagttgatgtgtttcttccaggatcaaatgaggtatggtatgactataagacatttgctcattgggaaggagggtgtactgtaaagatcccagtagccttggacactattccagtgtttcagcgaggtggaagtgtgataccaataaagacaactgtaggaaaatccacaggctggatgactgaatcctcctatggactccgggttgctctaagcactggttcttcagtgggtgagttatatcttgatgatggccattcattccaatacctccaccagaagcaatttttgcacaggaagttttcattctgttccagtgttctgatcaattccagttttgctgaccggaggggtcattatcccagcaagtgtgtggtggagaagatcttggtcttaggcttcaggaaggagccatcttctgtgactacccactcatctgatggtaaagatcagcctgtggcttttacgtattgtgccaaaacatccatcctgagcctggagaagctctcactcaacattgccactgactgggaggtccgcatcatatgacaaagaactgcccctggtgatgtgagc

SEQ ID NO: 678 - protein, 657 aa, Homo sapiens
MGIYGSVPYLLAHKLGRTIGIFWLNASETLVEINTEPAVEYTLTQMGPVAAKQKVRSRTHVHWMSESGIIDVFLLTGPTPSDVFKQYSHLTGIQAMPPLFSLGYHQCRWNYEDEQDVKAVDAGFDEHDIPYDAMWLDIEHTEGKRYFTWDKNRFPNPKRMQELLRSKKRKVLVVISDPHIKIDPDYSVYVKAKDQGFFVKNQEGEDFEGVCWPGLSSYLDFTNPKVREWYSSLFAFPVYQGSTDILFLWNDMNEPSVFRGPEQTMQKNAIHHGNWEHRELHNIYGFYHQMATAEGLIKRSKGKERPFVLTRSFFAGSQKYGAVWTGDNTAEWSNLKISIPMLLTLSITGISFCGADIGGFIGNPETELLVRWYQAGAYQPFFRGHATMNTKRREPWLFGEEHTRLIREAIRERYGLLPYWYSLFYHAHVASQPVMRRPLWVEFPDELKTFDMEDEYMLGLGSALLVHPVTEPKATTVDVFLPGSNEVWYDYKTFAHWEGGCTVKIPVALDTIPVFQRGGSVIPIKTTVGKSTGWMTESSYGLRVALSTGSSVGELYLDDGHSFQYLHQKQFLHRKFSFCSSVLINSSFADRRGHYPSKCVVEKILVLGFRKEPSSVTTHSSDGKDQPVAFTYCAKTSILSLEKLSLNIATDWEVRII

SEQ ID NO: 679 - DNA, 752 bp, Homo sapiens
  CDS (23)..(652)
ggcggggcggccggcggcggccatgggagatatcccagccgtgggcctcagctcctggaagcaggcttctccaggtaaagtgaccgaggcagtgaaagaggccattgacgcagggtaccggcacttcgactgtgcttacttttaccacaatgagagggaggttggagcagggatccgttgcaagatcaaggaaggcgctgtaagacgggaggatctgttcattgccactaagctgtggtgcacctgccataagaagtccttggtggaaacagcatgcagaaagagtctcaaggccttgaagctgaactatttggacctctacctcatacactggcccatgggtttcaagcctcctcatccagaatggatcatgagctgcagtgaactttccttctgcctctcacatcctcgagtgcaggacttgcctctggacgagagcaacatggttattcccagtgacacggacttcctggacacgtgggagattttgatccgatttcaaatccagaggaatgtgatagtgatccccggatctatcaccccaagtcacattaaagagaatatccaggtgtttgattttgaattaacacagcacgatatggataacatcctcagcctaaacaagaatctccgactggccatgttccccatgtaaatatggctccttctttttaaaacagagggaagaatatacagattgaatgattggtgtctgaatagaactaaaaatcacaaagactatcctttccaca

SEQ ID NO: 680 - protein, 210 aa, Homo sapiens
MGDIPAVGLSSWKQASPGKVTEAVKEAIDAGYRHFDCAYFYHNEREVGAGIRCKIKEGAVRREDLFIATKLWCTCHKKSLVETACRKSLKALKLNYLDLYLIHWPMGFKPPHPEWIMSCSELSFCLSHPRVQDLPLDESNMVIPSDTDFLDTWEILIRFQIQRNVIVIPGSITPSHIKENIQVFDFELTQHDMDNILSLNKNLRLAMFPM

SEQ ID NO: 681 - DNA, 569 bp, Homo sapiens
  CDS (1)..(549)
atgggagatatcccagccgtgggcctcagctcctggaaggcttctccaggaaaagtgaccgaggcagtgaaagaggccattgacgcagggtaccggcacttcgactgtgcttacttttaccacaatgagagggaggttggagcagggatccgttgcaagatcaaggaaggcgctgtaagacgggaggatctgttcattgccactaagcctcctcatccagaatggatcatgagctgcagtgaactttccttctgcctctcacatcctcgagtgcaggacttgcctctggacgagagcaacatggttattcccagtgacacggacttcctggacacgtgggagattttgatccgatttcaaatccagaggaatgtgatagtgatccccggatctatcaccccaagtcacattaaagagaatatccaggtgtttgattttgaattaacacagcacgatatggataacatcctcagcctaaacaggaatctccgactggccatgttccccataactaaaaatcacaaagactatcctttccacatagaatactgaggacgcttccccttcct

SEQ ID NO: 682 - protein, 183 aa, Homo sapiens
MGDIPAVGLSSWKASPGKVTEAVKEAIDAGYRHFDCAYFYHNEREVGAGIRCKIKEGAVRREDLFIATKPPHPEWIMSCSELSFCLSHPRVQDLPLDESNMVIPSDTDFLDTWEILIRFQIQRNVIVIPGSITPSHIKENIQVFDFELTQHDMDNILSLNRNLRLAMFPITKNHKDYPFHIEY

SEQ ID NO: 683 - DNA, 655 bp, Homo sapiens
  CDS (2)..(655)
caccagatctcccaccatgggagatatcccagccgtgggcctcagctcctggaagcaggcttctccagggaaagtgaccgaggcagtgaaagaggccattgacgcagggtaccggcacttcgactgtgcttacttttaccacaatgagagggaggttggagcagggatccgttgcaagatcaaggaaggcgctgtaagacgggaggatctgttcattgccactaagctgtggtgcacctgccataagaagtccttggtggaaacagcatgcagaaagagtctcaaggccttgaagctgaactatttggacctctacctcatacactggcccatgggtttcaagcctcctcatccagaatggatcatgagctgcagtgaactttccttctgcctctcacatcctcgagtgcaggacttgcctctggacgagagcaacgtggttattcccagtgacacggacttcctggacacgtgggagattttgatccgatttcaaatccagaggaatgtgatagtgatccccggatctatcaccccaagtcacattaaagagaatatccaggtgtttgattttgaattaacacagcacgatatggataacatcctcagcctaaacaggaacctccgactggccatgttccccatggtcgacggc

SEQ ID NO: 684 - protein, 218 aa, Homo sapiens
TRSPTMGDIPAVGLSSWKQASPGKVTEAVKEAIDAGYRHFDCAYFYHNEREVGAGIRCKIKEGAVRREDLFIATKLWCTCHKKSLVETACRKSLKALKLNYLDLYLIHWPMGFKPPHPEWIMSCSELSFCLSHPRVQDLPLDESNVVIPSDTDFLDTWEILIRFQIQRNVIVIPGSITPSHIKENIQVFDFELTQHDMDNILSLNRNLRLAMFPMVDG

SEQ ID NO: 685 - DNA, 956 bp, Homo sapiens
  CDS (31)..(936)
ggcggggcggcggggcggccggcggcggccatgggagatatcccagccgtgggcctcagctcctggaagcaggcttctccagggaaagtgaccgaggcagtgaaagaggccattgacgcagggtaccggcacttcgactgtgcttacttttaccacaatgagagggaggttggagcagggatccgttgcaagatcaaggaaggcgctgtaagacgggaggatctgttcattgccactaagctgtggtgcacctgccataagaagtccttggtggaaacagcatgcagaaagagtctcaaggccttgaagctgaactatttggacctctacctcatacactggcccatgggtttcaagcctcgagtgcaggacttgcctctggacgagagcaacatggttattcccagtgacacggacttcctggacacgtgggaggccatggaggacctggtgatcaccgggctggtgaagaacatcggggtgtcaaacttcaaccatgaacagcttgagaggcttttgaataagcctgggttgaggttcaagccactaaccaaccagattgagtgccacccatatcttactcagaagaatctgatcagtttttgccaatccagagatgtgtccgtgactgcttaccgtcctcttggtggctctagtgagggggttgacctgatagacaaccctgtgatcaagaggattgcaaaggagcacggcaagtctcctgctcagattttgatccgatttcaaatccagaggaatgtgatagtgatccccggatctatcaccccaagtcacattaaagagaatatccaggtgtttgattttgaattaacacagcacgatatggataacatcctcagcctaaacaggaatctccgactggccatgttccccagaactaaaaatcacaaagactatcctttccacatagaatactgaggacgcttccccttcct

SEQ ID NO: 686 - protein, 302 aa, Homo sapiens
MGDIPAVGLSSWKQASPGKVTEAVKEAIDAGYRHFDCAYFYHNEREVGAGIRCKIKEGAVRREDLFIATKLWCTCHKKSLVETACRKSLKALKLNYLDLYLIHWPMGFKPRVQDLPLDESNMVIPSDTDFLDTWEAMEDLVITGLVKNIGVSNFNHEQLERLLNKPGLRFKPLTNQIECHPYLTQKNLISFCQSRDVSVTAYRPLGGSSEGVDLIDNPVIKRIAKEHGKSPAQILIRFQIQRNVIVIPGSITPSHIKENIQVFDFELTQHDMDNILSLNRNLRLAMFPRTKNHKDYPFHIEY

SEQ ID NO: 687 - DNA, 875 bp, Homo sapiens
  CDS (23)..(775)
ggcggggcggccggcggcggccatgggagatatcccagccgtgggcctcagctcctggaagcaggcttctccaggaaaagtgaccgaggcagtgaaagaggccattgacgcagggtaccggcacttcgactgtgcttacttttaccacaatgagagggaggttggagcagggatccgttgcaagatcaaggaaggcgctgtaagacgggaggatctgttcattgccactaagctgtggtgcacctgccataagaagtccttggtggaaacagcatgcagaaagggtctcaaggccttgaagctgaactatttggacctctacctcatacactggcccatgggtttcaagcctcctcatccagaatggatcatgagctgcagtgaactttccttctgcctctcacatcctcgagtgcaggacttgcctctggacgagagcaacatggttattcccagtgacacggacttcctggacacgtgggaggccatggaggacctggtgatcaccgggctggtgaagaacatcggggtgtcaaacttcaaccatgaacagcttgagaggcttttgaataagcctgggttgaggttcaagccactaaccaaccagattttgatccgatttcaaatccagaggaatgtgatagtgatccccggatctatcaccccaagtcacattaaagagaatatccaggtgtttgattttgaattaacacagcacgatatggataacatcctcagcctaaacaggaatctccgactggccatgttccccatgtaaatatggctccttctttttaaaacagagggaagaatatacagattgaatgattggtgtctgaatagaactaaaaatcacaaagactatcctttccaca

SEQ ID NO: 688 - protein, 251 aa, Homo sapiens
MGDIPAVGLSSWKQASPGKVTEAVKEAIDAGYRHFDCAYFYHNEREVGAGIRCKIKEGAVRREDLFIATKLWCTCHKKSLVETACRKGLKALKLNYLDLYLIHWPMGFKPPHPEWIMSCSELSFCLSHPRVQDLPLDESNMVIPSDTDFLDTWEAMEDLVITGLVKNIGVSNFNHEQLERLLNKPGLRFKPLTNQILIRFQIQRNVIVIPGSITPSHIKENIQVFDFELTQHDMDNILSLNRNLRLAMFPM

SEQ ID NO: 689 - DNA, 785 bp, Homo sapiens
  CDS (31)..(765)
ggcggggcggcggggcggccggcggcggccatgggagatatcccagccgtgggcctcagctcctggaagcaggcttctccagggaaagtgaccgaggcagtgaaagaggccattgacgcagggtaccggcacttcgactgtgcttacttttaccacaatgagagggaggttggagcagggatccgttgcaagatcaaggaaggcgctgtaagacgggaggatctgttcattgccactaagctgtggtgcacctgccataagaagtccttggtggaaacagcatgcagaaagagtctcaaggccttgaagctgaactatttggacctctacctcatacactggcccatgggtttcaagcctcgagtgcaggacttgcctctggacgagagcaacatggttattcccagtgacacggacttcctggacacgtgggaggccatggaggacctggtgatcaccgggctggtgaagaacatcggggtgtcaaacttcaaccatgaacagcttgagaggcttttgaataagcctgggttgaggttcaagccactaaccaaccagattttgatccgatttcaaatccagaggaatgtgatagtgatccccggatctatcaccccaagtcacattaaagagaatatccaggtgtttgattttgaattaacacagcacgatatggataacatcctcagcctaaacaggaatctccgactggccatgttccccagaactaaaaatcacaaagactatcctttccacatagaatactgaggacgcttccccttcct

SEQ ID NO: 690 - protein, 245 aa, Homo sapiens
MGDIPAVGLSSWKQASPGKVTEAVKEAIDAGYRHFDCAYFYHNEREVGAGIRCKIKEGAVRREDLFIATKLWCTCHKKSLVETACRKSLKALKLNYLDLYLIHWPMGFKPRVQDLPLDESNMVIPSDTDFLDTWEAMEDLVITGLVKNIGVSNFNHEQLERLLNKPGLRFKPLTNQILIRFQIQRNVIVIPGSITPSHIKENIQVFDFELTQHDMDNILSLNRNLRLAMFPRTKNHKDYPFHIEY

SEQ ID NO: 691 - DNA, 937 bp, Homo sapiens
  CDS (31)..(837)
ggcggggcggcggggcggccggcggcggccatgggagatatcccagccgtgggcctcagctcctggaagcaggcttctccagggaaagtgaccgaggcagtgaaagaggccattgacgcagggtaccggcacttcgactgtgcttacttttaccacaatgagagggaggttggagcagggatccgttgcaagatcaaggaaggcgctgtaagacgggaggatctgttcattgccactaagcctcctcatccagaatggatcatgagctgcagtgaactttccttctgcctctcacatcctcgagtgcaggacttgcctctggacgagagcaacatggttattcccagtgacacggacttcctggacacgtgggaggccatggaggacctggtgatcaccgggctggtgaagaacatcggggtgtcaaacttcaaccatgaacagcttgagaggcttttgaataagcctgggttgaggttcaagccactaaccaaccagattgagtgccacccatatcttactcagaagaatctgatcagtttttgccaatccagagatgtgtccgtgactgcttaccgtcctcttggtggctcgtgtgagggggttgacctgatagacaaccctgtgatcaagaggattgcaaaggagcacggcaagtctcctgctcagattttgatccgatttcaaatccagaggaatgtgatagtgatccccggatctatcaccccaagtcacattaaagagaatatccaggtgtttgattttgaattaacacagcacgatatggataacatcctcagcctaaacaggaatctccgactggccatgttccccatgtaaatatggctccttctttttaaaacagagggaagaatatacagattgaatgattggtgtctgaatagaactaaaaatcacaaagactatcctttccaca

SEQ ID NO: 692 - protein, 269 aa, Homo sapiens
MGDIPAVGLSSWKQASPGKVTEAVKEAIDAGYRHFDCAYFYHNEREVGAGIRCKIKEGAVRREDLFIATKPPHPEWIMSCSELSFCLSHPRVQDLPLDESNMVIPSDTDFLDTWEAMEDLVITGLVKNIGVSNFNHEQLERLLNKPGLRFKPLTNQIECHPYLTQKNLISFCQSRDVSVTAYRPLGGSCEGVDLIDNPVIKRIAKEHGKSPAQILIRFQIQRNVIVIPGSITPSHIKENIQVFDFELTQHDMDNILSLNRNLRLAMFPM

SEQ ID NO: 693 - DNA, 1527 bp, Homo sapiens
  CDS (21)..(980)
cggggcggccggcggcggccatgggagatatcccagccgtgggcctcagctcctggaaggcttctccagggaaagtgaccgaggcagtgaaagaggccattgacgcagggtaccggcacttcgactgtgcttacttttaccacaatgagagggaggttggagcagggatccgttgcaagatcaaggaaggcgctgtaagacgggaggatctgttcattgccactaagctgtggtgcacctgccataagaagtccttggtggaaacagcatgcagaaagagtctcaaggccttgaagctgaactatttggacctctacctcatacactggcccatgggtttcaagcctcctcatccagaatggatcatgagctgcagtgaactttccttctgcctctcacatcctcgagtgcaggacttgcctctggacgagagcaacatggttattcccagtgacacggacttcctggacacgtgggaggccatggaggacctggtgatcaccgggctggtgaagaacatcggggtgtcaaacttcaaccatgaacagcttgagaggcttttgaataagcctgggttgaggttcaagccactaaccaaccagattgagtgccacccatatcttactcagaagaatctgatcagtttttgccaatccagagatgtgtccgtgactgcttaccgtcctcttggtggctcgtgtgagggggttgacctgatagacaaccctgtgatcaagaggattgcaaaggagcacggcaagtctcctgctcagattttgatccgatttcaaatccagaggaatgtgatagtgatccccggatctatcaccccaagtcacattaaagagaatatccaggtgtttgattttgaattaacacagcacgatatggataacatcctcagcctaaacaggaatctccgactggccatgttccccataactaaaaatcacaatgactatcctttccacatagaatactgaggacgcttccccttccttgtttctgctcagcccagatgcacagacactattggcaatgttgaccctcctctgtcatcacagcgccagggcagctgtgcctgggacaggagccacacagtcagagggggatgtaagagccaccttctctgacaaatctggagaattgagtgtgttctaagtgaaggcaatggggtttctccaagacagcctgtgtggcctctactctgaacaaatacactgatgagtcatcagtgaaatttgccttcacattttaagaaaactttatcttatggagttatttaagccatctacagagctgaggaaacagtgtaatgtgtctctgccccattgcgcagctccacccattgtgccccaggccagcccgcgtcacctacacttccttctgtgccctgccagtgacccccaggttattctaaagcagagtccttcccttcccccagtgagaaggaaaatgggataagtctgggacactgtttcagttcaataaagaggcttttttcttccttaaaaaaaaaaaaaaaaa

SEQ ID NO: 694 - protein, 320 aa, Homo sapiens [sequence omitted]

SEQ ID NO: 695 - DNA, 1680 bp, Homo sapiens
  CDS (101)..(1021)
ggcacgaggacggcgggtcgccagcgcctcagtagctcgcgcggtgcctgtcggtagtcgcgtgcggggcggcggggcggcggggcggccggcggcggccatgggagatatcccagccgtgggcctcagctcctggaaggcttctccagggaaagtgaccgaggcagtgaaagaggccattgacgcagggtaccggcacttcgactgtgcttacttttaccacaatgagagggaggttggagcagggatccgttgcaagatcaaggaaggcgctgtaagacgggaggatctgttcattgccactaagctgtggtgcacctgccataagaagtccttggtggaaacagcatgcagaaagagtctcaaggccttgaagctgaactatttggacctctacctcatacactggcccatgggtttcaagcctcctcatccagaatggatcatgagctgcagtgaactttccttctgcctctcacatcctcgagtgcaggacttgcctctggacgagagcaacatggttattcccagtgacacggacttcctggacacgtgggaggccatggaggacctggtgatcaccgggctggtgaagaacatcggggtgtcaaacttcaaccatgaacagcttgagaggcttttgaataagcctgggttgaggttcaagccactaaccaaccagattgagtgccacccatatcttactcagaagaatctgatcagtttttgccaatccagagatgtgtccgtgactgcttaccgtcctcttggtggctcgtgtgagggggttgacctgatagacaaccctgtgatcaagaggattgcaaaggagcacggcaagtctcctgctcagattttgatccgatttcaaatccagaggaatgtgatagtgatccccggatctatcaccccaagtcacattaaagagaatatccaggtgtttgattttgaattaacacagcacgatatggataacatcctcagcctaaacaggaatctccgactggccatgttccccatgtaaatatggctccttctttttaaaacagagggaagaatatacagattgaatgattggtgtctgaatagaactaaaaatcacaaagactatcctttccacatagaatactgaggacgcttccccttccttgtttctgctcagcccagatgcacagacactattggcaatgttgaccctcctctgtcatcacagcgccagggcagctgtgcctgggacaggagccacacagtcagagggggatgtaagagccaccttctctgacaaatctggagaattgagtgtgttctaagtgaaggcaatggggtttctccaagacagcctgtgtggcctctactctgaacaaatacactgatgagtcatcagtgaaatttgccttcacattttaagaaaactttatcttatggagttatttaagccatctacagagctgaggaaacagtgtaatgtgtctctgccccattgcgcagctccacccattgtgccccaggccagcccgcgtcacctacacttccttctgtgccctgccagtgacccccaggttattctaaagcagagtccttcccttcccccagtgagaaggaaaatgggataagtctgggacactgtttcagttcaataaagaggcttttttcttccttaaaaaaaaaaaaaaaaaaaaa

SEQ ID NO: 696 - protein, 307 aa, Homo sapiens
MGDIPAVGLSSWKASPGKVTEAVKEAIDAGYRHFDCAYFYHNEREVGAGIRCKIKEGAVRREDLFIATKLWCTCHKKSLVETACRKSLKALKLNYLDLYLIHWPMGFKPPHPEWIMSCSELSFCLSHPRVQDLPLDESNMVIPSDTDFLDTWEAMEDLVITGLVKNIGVSNFNHEQLERLLNKPGLRFKPLTNQIECHPYLTQKNLISFCQSRDVSVTAYRPLGGSCEGVDLIDNPVIKRIAKEHGKSPAQILIRFQIQRNVIVIPGSITPSHIKENIQVFDFELTQHDMDNILSLNRNLRLAMFPM

SEQ ID NO: 697 - DNA, 752 bp, Homo sapiens
  CDS (23)..(652)
ggcggggcggccggcggcggccatgggagatatcccagccgtgggcctcagctcctggaagcaggcttctccaggtaaagtgaccgaggcagtgaaagaggccattgacgcagggtaccggcacttcgactgtgcttacttttaccacaatgagagggaggttggagcagggatccgttgcaagatcaaggaaggcgctgtaagacgggaggatctgttcattgccactaagctgtggtgcacctgccataagaagtccttggtggaaacagcatgcagaaagagtctcaaggccttgaagctgaactatttggacctctacctcatacactggcccatgggtttcaagcctcctcatccagaatggatcatgagctgcagtgaactttccttctgcctctcacatcctcgagtgcaggacttgcctctggacgagagcaacatggttattcccagtgacacggacttcctggacacgtgggagattttgatccgatttcaaatccagaggaatgtgatagtgatccccggatctatcaccccaagtcacattaaagagaatatccaggtgtttgattttgaattaacacagcacgatatggataacatcctcagcctaaacaggaatctccgactggccatgttccccatgtaaatatggctccttctttttaaaacagagggaagaatatacagattgaatgattggtgtctgaatagaactaaaaatcacaaagactatcctttccaca

SEQ ID NO: 698 - protein, 210 aa, Homo sapiens
MGDIPAVGLSSWKQASPGKVTEAVKEAIDAGYRHFDCAYFYHNEREVGAGIRCKIKEGAVRREDLFIATKLWCTCHKKSLVETACRKSLKALKLNYLDLYLIHWPMGFKPPHPEWIMSCSELSFCLSHPRVQDLPLDESNMVIPSDTDFLDTWEILIRFQIQRNVIVIPGSITPSHIKENIQVFDFELTQHDMDNILSLNRNLRLAMFPM

SEQ ID NO: 699 - DNA, 1222 bp, Homo sapiens
  CDS (41)..(1162)
ccagagaggcccagaattttctaacttactgtgtggcagaatgaagcctctgcttgaaaccctttatcttttggggatgctggttcctggagggctgggatatgatagatccttagcccaacacagacaagagattgtggacaagtcagtgagtccatggagcctggagacgtattcctataacatataccaccccatgggagagatctatgagtggatgagagagatcagtgagaagtacaaggaagtggtgacacagcatttcctaggagtgacctatgagacccaccccatatattatctgaagatcagccaaccatctggtaatcccaagaaaatcatttggatggactgtggaattcacgccagagaatggattgctcctgctttttgccaatggttcgtcaaagaaattctacaaaaccataaagacaactcaaggatacgcaagctccttaggaacctggacttctatgtccttccagttcttaacatagatggttatatctacacttggacaactgatcgtctttggaggaaatcccgttcaccccataataatggcacatgttttgggacggatctcaatcgaaatttcaatgcttcttggtgtagtattggtgcctctagaaactgccaagatcaaacattctgtgggacagggccagtgtctgaaccagagactaaagctgttgccagcttcatagagagcaagaaggatgatattttgtgcttcctgaccatgcactcttatgggcagttaattctcacaccttacggctacaccaaaaataaatcaagtaaccacccagaaatgattcaagttggacagaaggcagcaaatgcattgaaagcaaagtatggaaccaattatagagttggatcgagtgcagatattttatatgcctcatcagggtcttcaagagattgggcccgagacattgggattcccttctcatatacgtttgagctgagggacagtggaacatatgggtttgttctgccagaagctcagatccagcccacctgtgaggagaccatggaggctgtgctgtcagtcctggatgatgtgtatgcgaaacactggcactcggacagtgctggaagggtgacatctgccactatgctgctgggcctgctggtgtcctgcatgtctcttctctaagtgcattctgcccaggcctgctcaaccccagtggcatgagtgtggcttggaggaacg

SEQ ID NO: 700 - protein, 374 aa, Homo sapiens [sequence omitted]

SEQ ID NO: 701 - DNA, 1579 bp, Homo sapiens
  CDS (67)..(1395)
ccaattgacaagcttttgattttaacgacttttaacgacaacttgagaagatcaaaaaacaactaattattcgaaacgatgagatttccttcaatttttactgctgttttattcgcagcatcctccgcattagctgctccagtcaacactacaacagaagatgaaacggcacaaattccggctgaagctgtcatcggttactcagatttagaaggggatttcgatgttgctgttttgccattttccaacagcacaaataacgggttattgtttataaatactactattgccagcattgctgctaaagaagaaggggtatctctcgagaaaagatatgatagatccttagcccaacacagacaagagattgtggacaagtcagtgagtccatggagcctggagacgtattcctataacatataccaccccatgggagagatctatgagtggatgagagagatcagtgagaagtacaaggaagtggtgacacagcatttcctaggagtgacctatgagacccaccccatgtattatctgaagatcagccaaccatctggtaatcccaagaaaatcatttggatggactgtggaattcacgccagagaatggattgctcctgctttttgccaatggttcgtcaaagaaattctacaaaaccataaagacaactcaagtatacgcaagcttcttaggaacctggacttctatgtccttccagttcttaacatagatggttatatctacacttggacaactgatcgtctttggaggaaatcccgttcaccccataataatggcacatgttttgggacggatctcaatcgaaatttcaatgcatcttggtgtagtattggtgcctctagaaactgccaagatcaaacattctgtgggacagggccagtgtctgaaccagagactaaagctgttgccagcttcatagagagcaagaaggatgatattttgtgcttcctgaccatgcactcttatgggcagttaattctcacaccttacggctacaccaaaaataaatcaagtaaccacccagaaatgattcaagttggacagaaggcagcaaatgcattgaaagcaaagtatggaaccaattatagagttggatcgagtgcagatattttatatgcctcatcagggtcttcaagagattgggcccgagacattgggattcccttctcatatacgtttgagctgagggacagtggaacgtatgggtttgttctgccagaagctcagatccagcccacctgtgaggagaccatggaggctgtgctgtcagtcctggatgatgtgtatgcgaaacactggcactcggacagtgctggaagggtgacatctgccactatgctgctgggcctgctggtgtcctgcatgtctcttctctaagcggccgccagctttctagaacaaaaactcatctcagaagaggatctgaatagcgccgtcgaccatcatcatcatcatcattgagtttgtagccttagacatgactgttcctcagttcaagttgggcacttacgagaagaccggtcttgctagattctaatcaagaggatgtcagaatgcc

SEQ ID NO: 702 - protein, 443 aa, Homo sapiens
LFETMRFPSIFTAVLFAASSALAAPVNTTTEDETAQIPAEAVIGYSDLEGDFDVAVLPFSNSTNNGLLFINTTIASIAAKEEGVSLEKRYDRSLAQHRQEIVDKSVSPWSLETYSYNIYHPMGEIYEWMREISEKYKEVVTQHFLGVTYETHPMYYLKISQPSGNPKKIIWMDCGIHAREWIAPAFCQWFVKEILQNHKDNSSIRKLLRNLDFYVLPVLNIDGYIYTWTTDRLWRKSRSPHNNGTCFGTDLNRNFNASWCSIGASRNCQDQTFCGTGPVSEPETKAVASFIESKKDDILCFLTMHSYGQLILTPYGYTKNKSSNHPEMIQVGQKAANALKAKYGTNYRVGSSADILYASSGSSRDWARDIGIPFSYTFELRDSGTYGFVLPEAQIQPTCEETMEAVLSVLDDVYAKHWHSDSAGRVTSATMLLGLLVSCMSLL

SEQ ID NO: 703 - DNA, 1607 bp, Homo sapiens
  CDS (74)..(1420)
actggttccaattgacaagcttttgattttaacgacttttaacgacaacttgagaagatcaaaaaacaactaattattcgaaacgatgagatttccttcaatttttactgctgttttattcgcagcatcctccgcattagctgctccagtcaacactacaacagaagatgaaacggcacaaattccggctgaagctgtcatcggttactcagatttagaaggggatttcgatgttgctgttttgccattttccaacagcacaaataacgggttattgtttataaatactactattgccagcattgctgctaaagaagaaggggtatctctcgagaaaagatatgatagatccttagcccaacacagacaagagattgtggacaagtcagtgagtccatggagcctggagacgtattcctataacatataccaccccatgggagagatctatgagtggatgagagagatcagtgagaagtacaaggaagtggtgacacagcatttcctaggagtgacctatgagacccaccccatgtattatctgaagatcagccaaccatctggtaatcccaagaaaatcatttggatggactgtggaattcacgccagagaatggattgctcctgctttttgccaatggttcgtcaaagaaattctacaaaaccataaagacaactcaagtatacgcaagcttcttaggaacctggacttctatgtccttccagttcttaacatagatggttatatctacacttggacaactgatcgtctttggaggaaatcccgttcaccccataataatggcacatgttttgggacggatctcaatcgaaatttcaatgcatcttggtgtagtattggtgcctctagaaactgccaagatcaaacattctgtgggacagggccagtgtctgaaccagagactaaagctgttgccagcttcatagagagcaagaaggatgatattttgtgcttcctgaccatgcactcttatgggcagttaattctcacaccttacggctacaccaaaaataaatcaagtaaccacccagaaatgattcaagttggacagaaggcagcaaatgcattgaaagcaaagtatggaaccaattatagagttggatcgagtgcagatattttatatgcctcatcagggtcttcaagagattgggcccgagacattgggattcccttctcatatacgtttgagctgagggacagtggaacgtatgggtttgttctgccagaagctcagatccagcccacctgtgaggagaccatggaggctgtgctgtcagtcctggatgatgtgtatgcgaaacactggcactcggacagtgctggaagggtgacatctgccactatgctgctgggcctgctggtgtcctgcatgtctcttctccaccatcaccaccatcactaagcggccgccagctttctagaacaaaaactcatctcagaagaggatctgaatagcgccgtcgaccatcatcatcatcatcattgagtttgtagccttagacatgactgttcctcagttcaagttgggcacttacgagaagaccggtcttgctagattctaatcaagaggatgtcagaatgccatt

SEQ ID NO: 704 - protein, 449 aa, Homo sapiens
LFETMRFPSIFTAVLFAASSALAAPVNTTTEDETAQIPAEAVIGYSDLEGDFDVAVLPFSNSTNNGLLFINTTIASIAAKEEGVSLEKRYDRSLAQHRQEIVDKSVSPWSLETYSYNIYHPMGEIYEWMREISEKYKEVVTQHFLGVTYETHPMYYLKISQPSGNPKKIIWMDCGIHAREWIAPAFCQWFVKEILQNHKDNSSIRKLLRNLDFYVLPVLNIDGYIYTWTTDRLWRKSRSPHNNGTCFGTDLNRNFNASWCSIGASRNCQDQTFCGTGPVSEPETKAVASFIESKKDDILCFLTMHSYGQLILTPYGYTKNKSSNHPEMIQVGQKAANALKAKYGTNYRVGSSADILYASSGSSRDWARDIGIPFSYTFELRDSGTYGFVLPEAQIQPTCEETMEAVLSVLDDVYAKHWHSDSAGRVTSATMLLGLLVSCMSLLHHHHHH

SEQ ID NO: 705 - DNA, 1148 bp, Homo sapiens
  CDS (2)..(1126)
caccatgaagcctctgcttgaaaccctttatcttttggggatgctggttcctggagggctgggatatgatagatccttagcccaacacagacaagagattgtggacaagtcagtgagtccatggagcctggagacgtattcctataacatataccaccccatgggagagatctatgagtggatgagagagatcagtgagaagtacaaggaagtggtgacacagcatttcctaggagtgacctatgagacccaccccatgtattatctgaagatcagccaaccatctggtaatcccaagaaaatcatttggatggactgtggaattcacgccagagaatggattgctcctgctttttgccaatggttcgtcaaagaaattctacaaaaccataaagacaactcaagtatacgcaagcttcttaggaacctggacttctatgtccttccagttcttaacatagatggttatatctacacttggacaactgatcgtctttggaggaaatcccgttcaccccataataatggcacatgttttgggacggatctcaatcgaaatttcaatgcatcttggtgtagtattggtgcctctagaaactgccaagatcaaacattctgtgggacagggccagtgtctgaaccagagactaaagctgttgccagcttcatagagagcaagaaggatgatattttgtgcttcctgaccatgcactcttatgggcagttaattctcacaccttacggctacaccaaaaataaatcaagtaaccacccagaaatgattcaagttggacagaaggcagcaaatgcattgaaagcaaagtatggaaccaattatagagttggatcgagtgcagatattttatatgcctcatcagggtcttcaagagattgggcccgagacattgggattcccttctcatatacgtttgagctgagggacagtggaacgtatgggtttgttctgccagaagctcagatccagcccacctgtgaggagaccatggaggctgtgctgtcagtcctggatgatgtgtatgcgaaacactggcactcggacagtgctggaagggtgacatctgccactatgctgctgggcctgctggtgtcctgcatgtctcttctctaagcggccgctcgagtctaga

SEQ ID NO: 706 - protein, 375 aa, Homo sapiens
TMKPLLETLYLLGMLVPGGLGYDRSLAQHRQEIVDKSVSPWSLETYSYNIYHPMGEIYEWMREISEKYKEVVTQHFLGVTYETHPMYYLKISQPSGNPKKIIWMDCGIHAREWIAPAFCQWFVKEILQNHKDNSSIRKLLRNLDFYVLPVLNIDGYIYTWTTDRLWRKSRSPHNNGTCFGTDLNRNFNASWCSIGASRNCQDQTFCGTGPVSEPETKAVASFIESKKDDILCFLTMHSYGQLILTPYGYTKNKSSNHPEMIQVGQKAANALKAKYGTNYRVGSSADILYASSGSSRDWARDIGIPFSYTFELRDSGTYGFVLPEAQIQPTCEETMEAVLSVLDDVYAKHWHSDSAGRVTSATMLLGLLVSCMSLL

SEQ ID NO: 707 - DNA, 1148 bp, Homo sapiens
  CDS (3)..(1145)
ccaccatgaagcctctgcttgaaaccctttatcttttggggatgctggttcctggagggctgggatatgatagatccttagcccaacacagacaagagattgtggacaagtcagtgagtccatggagcctggagacgtattcctataacatataccaccccatgggagagatctatgagtggatgagagagatcagtgagaagtacaaggaagtggtgacacagcatttcctaggagtgacctatgagacccaccccatgtattatctgaagatcagccaaccatctggtaatcccaagaaaatcatttggatggactgtggaattcacgccagagaatggattgctcctgctttttgccaatggttcgtcaaagaaattctacaaaaccataaagacaactcaagtatacgcaagcttcttaggaacctggacttctatgtccttccagttcttaacatagatggttatatctacacttggacaactgatcgtctttggaggaaatcccgttcaccccataataatggcacatgttttgggacggatctcaatcgaaatttcaatgcatcttggtgtagtattggtgcctctagaaactgccaagatcaaacattctgtgggacagggccagtgtctgaaccagagactaaagctgttgccagcttcatagagagcaagaaggatgatattttgtgcttcctgaccatgcactcttatgggcagttaattctcacaccttacggctacaccaaaaataaatcaagtaaccacccagaaatgattcaagttggacagaaggcagcaaatgcattgaaagcaaagtatggaaccaattatagagttggatcgagtgcagatattttatatgcctcatcagggtcttcaagagattgggcccgagacattgggattcccttctcatatacgtttgagctgagggacagtggaacgtatgggtttgttctgccagaagctcagatccagcccacctgtgaggagaccatggaggctgtgctgtcagtcctggatgatgtgtatgcgaaacactggcactcggacagtgctggaagggtgacatctgccactatgctgctgggcctgctggtgtcctgcatgtctcttctccaccatcaccaccatcactaa

SEQ ID NO: 708 - protein, 381 aa, Homo sapiens
TMKPLLETLYLLGMLVPGGLGYDRSLAQHRQEIVDKSVSPWSLETYSYNIYHPMGEIYEWMREISEKYKEVVTQHFLGVTYETHPMYYLKISQPSGNPKKIIWMDCGIHAREWIAPAFCQWFVKEILQNHKDNSSIRKLLRNLDFYVLPVLNIDGYIYTWTTDRLWRKSRSPHNNGTCFGTDLNRNFNASWCSIGASRNCQDQTFCGTGPVSEPETKAVASFIESKKDDILCFLTMHSYGQLILTPYGYTKNKSSNHPEMIQVGQKAANALKAKYGTNYRVGSSADILYASSGSSRDWARDIGIPFSYTFELRDSGTYGFVLPEAQIQPTCEETMEAVLSVLDDVYAKHWHSDSAGRVTSATMLLGLLVSCMSLLHHHHHH

SEQ ID NO: 709 - DNA, 1151 bp, Homo sapiens
  CDS (3)..(1148)
ccaccatgggccaccatcaccaccatcacaagcctctgcttgaaaccctttatcttttggggatgctggttcctggagggctgggatatgatagatccttagcccaacacagacaagagattgtggacaagtcagtgagtccatggagcctggagacgtattcctataacatataccaccccatgggagagatctatgagtggatgagagagatcagtgagaagtacaaggaagtggtgacacagcatttcctaggagtgacctatgagacccaccccatgtattatctgaagatcagccaaccatctggtaatcccaagaaaatcatttggatggactgtggaattcacgccagagaatggattgctcctgctttttgccaatggttcgtcaaagaaattctacaaaaccataaagacaactcaagtatacgcaagcttcttaggaacctggacttctatgtccttccagttcttaacatagatggttatatctacacttggacaactgatcgtctttggaggaaatcccgttcaccccataataatggcacatgttttgggacggatctcaatcgaaatttcaatgcatcttggtgtagtattggtgcctctagaaactgccaagatcaaacattctgtgggacagggccagtgtctgaaccagagactaaagctgttgccagcttcatagagagcaagaaggatgatattttgtgcttcctgaccatgcactcttatgggcagttaattctcacaccttacggctacaccaaaaataaatcaagtaaccacccagaaatgattcaagttggacagaaggcagcaaatgcattgaaagcaaagtatggaaccaattatagagttggatcgagtgcagatattttatatgcctcatcagggtcttcaagagattgggcccgagacattgggattcccttctcatatacgtttgagctgagggacagtggaacgtatgggtttgttctgccagaagctcagatccagcccacctgtgaggagaccatggaggctgtgctgtcagtcctggatgatgtgtatgcgaaacactggcactcggacagtgctggaagggtgacatctgccactatgctgctgggcctgctggtgtcctgcatgtctcttctctaa

SEQ ID NO: 710 - protein, 382 aa, Homo sapiens
TMGHHHHHHKPLLETLYLLGMLVPGGLGYDRSLAQHRQEIVDKSVSPWSLETYSYNIYHPMGEIYEWMREISEKYKEVVTQHFLGVTYETHPMYYLKISQPSGNPKKIIWMDCGIHAREWIAPAFCQWFVKEILQNHKDNSSIRKLLRNLDFYVLPVLNIDGYIYTWTTDRLWRKSRSPHNNGTCFGTDLNRNFNASWCSIGASRNCQDQTFCGTGPVSEPETKAVASFIESKKDDILCFLTMHSYGQLILTPYGYTKNKSSNHPEMIQVGQKAANALKAKYGTNYRVGSSADILYASSGSSRDWARDIGIPFSYTFELRDSGTYGFVLPEAQIQPTCEETMEAVLSVLDDVYAKHWHSDSAGRVTSATMLLGLLVSCMSLL

SEQ ID NO: 711 - DNA, 1162 bp, Homo sapiens
  CDS (2)..(1147)
caccatgggccaccatcaccaccatcacaagcctctgcttgaaaccctttatcttttggggatgctggttcctggagggctgggatatgatagatccttagcccaacacagacaagagattgtggacaagtcagtgagtccatggagcctggagacgtattcctataacatataccaccccatgggagagatctatgagtggatgagagagatcagtgagaagtacaaggaagtggtgacacagcatttcctaggagtgacctatgagacccaccccatgtattatctgaagatcagccaaccatctggtaatcccaagaaaatcatttggatggactgtggaattcacgccagagaatggattgctcctgctttttgccaatggttcgtcaaagaaattctacaaaaccataaagacaactcaagtatacgcaagcttcttaggaacctggacttctatgtccttccagttcttaacatagatggttatatctacacttggacaactgatcgtctttggaggaaatcccgttcaccccataataatggcacatgttttgggacggatctcaatcgaaatttcaatgcatcttggtgtagtattggtgcctctagaaactgccaagatcaaacattctgtgggacagggccagtgtctgaaccagagactaaagctgttgccagcttcatagagagcaagaaggatgatattttgtgcttcctgaccatgcactcttatgggcagttaattctcacaccttacggctacaccaaaaataaatcaagtaaccacccagaaatgattcaagttggacagaaggcagcaaatgcattgaaagcaaagtatggaaccaattatagagttggatcgagtgcagatattttatatgcctcatcagggtcttcaagagattgggcccgagacattgggattcccttctcatatacgtttgagctgagggacagtggaacgtatgggtttgttctgccagaagctcagatccagcccacctgtgaggagaccatggaggctgtgctgtcagtcctggatgatgtgtatgcgaaacactggcactcggacagtgctggaagggtgacatctgccactatgctgctgggcctgctggtgtcctgcatgtctcttctctaagcggccgctttc

SEQ ID NO: 712 - protein, 382 aa, Homo sapiens; identical to SEQ ID NO: 710

SEQ ID NO: 713 - DNA, 1162 bp, Homo sapiens; identical to SEQ ID NO: 711
  CDS (2)..(1147)

SEQ ID NO: 714 - protein, 382 aa, Homo sapiens; identical to SEQ ID NO: 710

SEQ ID NO: 715 - DNA, 1196 bp, Homo sapiens
  CDS (16)..(1137)
ttactgtgtggcagaatgaagcctctgcttgaaaccctttatcttttggggatgctggttcctggagggctgggatatgatagatccttagcccaacacagacaagagattgtggacaagtcagtgagtccatggagcctggagacgtattcctataacatataccaccccatgggagagatcaatgagtggatgagagagatcagtgagaagtacaaggaagtggtgacacagcatttcctaggagtgacctatgagacccaccccatatattatctgaagatcagccaaccatctggtaatcccaagaaaatcatttggatgggctgtggaattcacgccagagaatggattgctcctgctttttgccaatggttcgtcaaagaaattctacaaaaccataaagacaactcaaggatacgcaagctccttaggaacctggacttctatgtccttccagttcttaacatagatggttatatctacacttggacaactgatcgtctttggaggaaatcccgttcaccccataataatggcacatgttttgggacggatctcaatcgaaatttcaatgcatcttggtgtagtattggtgcctctagaaactgccaagatcaaacattctgtgggacagggccagtgtctgaaccagagactaaagctgttgccagcttcatagagagcaagaaggatgatattttgtgcttcctgaccatgcactcttatgggcagttaattctcacaccttacggctacaccaaaaataaatcaagtaaccacccagaaatgattcaagttggacagaaggcagcaaatgcattgaaagcaaagtatggaaccaattatagagttggatcgagtgcagatattttatatgcctcatcagggtcttcaagagattgggcccgagacattgggattcccttctcatatacgtttgagctgagggacagtggaacatatgggtttgttctgccagaagctcagatccagcccacctgtgaggagaccatggaggctgtgctgtcagtcctggatgatgtgtatgcgaaacactggcactcggacagtgctggaagggtgacatctgccactatgctgctgggcctgctggtgtcctgcatgtctcttctctaagtgcatcctgcccaggcctgctcaaccccagtggcatgagtgtggctggaggaacg

SEQ ID NO: 716 - protein, 374 aa, Homo sapiens
MKPLLETLYLLGMLVPGGLGYDRSLAQHRQEIVDKSVSPWSLETYSYNIYHPMGEINEWMREISEKYKEVVTQHFLGVTYETHPIYYLKISQPSGNPKKIIWMGCGIHAREWIAPAFCQWFVKEILQNHKDNSRIRKLLRNLDFYVLPVLNIDGYIYTWTTDRLWRKSRSPHNNGTCFGTDLNRNFNASWCSIGASRNCQDQTFCGTGPVSEPETKAVASFIESKKDDILCFLTMHSYGQLILTPYGYTKNKSSNHPEMIQVGQKAANALKAKYGTNYRVGSSADILYASSGSSRDWARDIGIPFSYTFELRDSGTYGFVLPEAQIQPTCEETMEAVLSVLDDVYAKHWHSDSAGRVTSATMLLGLLVSCMSLL

SEQ ID NO: 717 - DNA, 1008 bp, Homo sapiens
  CDS (1)..(1008)
tatgatagatccttagcccaacacagacaagagattgtggacaagtcagtgagtccatggagcctggagacgtattcctataacatataccaccccatgggagagatctatgagtggatgagagagatcagtgagaagtacaaggaagtggtgacacagcatttcctaggagtgacctatgagacccaccccatgtattatctgaagatcagccaaccatctggtaatcccaagaaaatcatttggatggactgtggaattcacgccagagaatggattgctcctgctttttgccaatggttcgtcaaagaaattctacaaaaccataaagacaactcaagtatacgcaagctccttaggaacctggacttctatgtccttccagttcttaacatagatggttatatctacacttggacaactgatcgtctttggaggaaatcccgttcaccccataataatggcacatgttttgggacggatctcaatcgaaatttcaatgcatcttggtgtagtattggtgcctctagaaactgccaagatcaaacattctgtgggacagggccagtgtctgaaccagagactaaagctgttgccagcttcatagagagcaagaaggatgatattttgtgcttcctgaccatgcactcttatgggcagttaattctcacaccttacggctacaccaaaaataaatcaagtaaccacccagaaatgattcaagttggacagaaggcagcaaatgcattgaaagcaaagtatggaaccaattatagagttggatcgagtgcagatattttatatgcctcatcagggtcttcaagagattgggcccgagacattgggattcccttctcatatacgtttgagctgagggacagtggaacatatgggtttgttctgccagaagctcagatccagcccacctgtgaggagaccatggaggctgtgctgtcagtcctggatgatgtgtatgcgaaacactggcactcggacagtgctggaagg

SEQ ID NO: 718 - protein, 336 aa, Homo sapiens
YDRSLAQHRQEIVDKSVSPWSLETYSYNIYHPMGEIYEWMREISEKYKEVVTQHFLGVTYETHPMYYLKISQPSGNPKKIIWMDCGIHAREWIAPAFCQWFVKEILQNHKDNSSIRKLLRNLDFYVLPVLNIDGYIYTWTTDRLWRKSRSPHNNGTCFGTDLNRNFNASWCSIGASRNCQDQTFCGTGPVSEPETKAVASFIESKKDDILCFLTMHSYGQLILTPYGYTKNKSSNHPEMIQVGQKAANALKAKYGTNYRVGSSADILYASSGSSRDWARDIGIPFSYTFELRDSGTYGFVLPEAQIQPTCEETMEAVLSVLDDVYAKHWHSDSAGR

SEQ ID NO: 719 - DNA, 1579 bp, Homo sapiens; identical to SEQ ID NO: 701
  CDS (334)..(1395)

SEQ ID NO: 720 - protein, 354 aa, Homo sapiens
YDRSLAQHRQEIVDKSVSPWSLETYSYNIYHPMGEIYEWMREISEKYKEVVTQHFLGVTYETHPMYYLKISQPSGNPKKIIWMDCGIHAREWIAPAFCQWFVKEILQNHKDNSSIRKLLRNLDFYVLPVLNIDGYIYTWTTDRLWRKSRSPHNNGTCFGTDLNRNFNASWCSIGASRNCQDQTFCGTGPVSEPETKAVASFIESKKDDILCFLTMHSYGQLILTPYGYTKNKSSNHPEMIQVGQKAANALKAKYGTNYRVGSSADILYASSGSSRDWARDIGIPFSYTFELRDSGTYGFVLPEAQIQPTCEETMEAVLSVLDDVYAKHWHSDSAGRVTSATMLLGLLVSCMSLL

SEQ ID NO: 721 - DNA, 1607 bp, Homo sapiens; identical to SEQ ID NO: 703
  CDS (341)..(1402)

SEQ ID NO: 722 - protein, 354 aa, Homo sapiens; identical to SEQ ID NO: 720

SEQ ID NO: 723 - DNA, 977 bp, Homo sapiens
  CDS (41)..(670)
ccagagaggcccagaattttctaacttactgtgtggcagaatgaagcctctgcttgaaaccctttatcttttggggatgctggttcctggagggctgggatatgatagatccttagcccaacacagacaagagattgtggacaagtcagtgagtccatggagcctggaaacgtattcctataacatataccaccccatgggagagatctatgagtggatgagagagatcagtgagaagtacaaggaagtggtgacacagcatttcctaggagtgacctatgagacccaccccatatattatctgaagatcagccaaccatctggtaatcccaagaaaatcatttggatggactgtggaattcacgccagagaatggattgctcctgctttttgccaatggttcgtcaaagaaattctacaaaaccataaagacaactcaaggatacgcaagctccttaggaacctggacttctatgtccttccagttcttaacatagatggttatatctacacttggacaactgatcgtctttggaggaaatcccgttcaccccataataatggcacatgttttgggacggatctcaatcgaaatttcaatgcttcttggtgtaattcaagttggacagaaggcagcaaatgcattgaaagcaaagtatggaaccaattatagagttggatcgagtgcagatattttatatgcctcatcagggtcttcaagagattgggcccgagacattgggattcccttctcatatacgtttgagctgagggacagtggaacatatgggtttgttctgccagaagctcagatccagcccacctgtgaggagaccatggaggctgtgctgtcagtcctggatgatgtgtatgcgaaacactggcactcggacagtgctggaagggtgacatctgccactatgctgctgggcctgctggtgtcctgcatgtctcttctctaagtgcatcctgcccag

SEQ ID NO: 724 - protein, 210 aa, Homo sapiens
MKPLLETLYLLGMLVPGGLGYDRSLAQHRQEIVDKSVSPWSLETYSYNIYHPMGEIYEWMREISEKYKEVVTQHFLGVTYETHPIYYLKISQPSGNPKKIIWMDCGIHAREWIAPAFCQWFVKEILQNHKDNSRIRKLLRNLDFYVLPVLNIDGYIYTWTTDRLWRKSRSPHNNGTCFGTDLNRNFNASWCNSSWTEGSKCIESKVWNQL

SEQ ID NO: 725 - DNA, 1378 bp, Homo sapiens
  CDS (259)..(1224)
actcactatagggctcgagcggccgcccgggcaggtgaaaatacatcagcatgtgggaaagagcaacgttgatcgtcttcacggaaaggctgaggaccctgcgcctaccacatgttggccagggtgagcaagcagtgaaagagaaaacacttttttcaaaaagccaactgatccttagcccaacacagacaagagattgtggacaagtcagtgagtccatggagcctggagacgtattcctataacatataccaccccatgggagagatctatgagtggatgagagagatcagtgagaagtacaaggaagtggtgacacagcatttcctaggagtgacctatgagacccaccccatatattatctgaagatcagccaaccatctggtaatcccaagaaaatcatttggatggactgtggaattcacgccagagaatggattgctcctgctttttgccaatggttcgtcaaagaaattctacaaaaccataaagacaactcaaggatacgcaagctccttaggaacctggacttctatgtccttccagttcttaacatagatggttatatctacacttggacaactgatcgtctttggaggaaatcccgttcaccccataataatggcacatgttttgggacggatctcaatcgaaatttcaatgcttcttggtgtagtattggtgcctctagaaactgccaagatcaaacattctgtgggacagggccagtgtctgaaccagagactaaagctgttgccagcttcatagagagcaagaaggatgatattttgtgcttcctgaccatgcactcttatgggcagttaattctcacaccttacggctacaccaaaaataaatcaagtaaccacccagaaatgattcaagttggacagaaggcagcaaatgcattgaaagcaaagtatggaaccaattatagagttggatcgagtgcagatattttatatgcctcatcagggtcttcaagagattgggcccgagacattgggattcccttctcatatacgtttgagctgagggacagtggaacatatgggtttgttctgccagaagctcagatccagcccacctgtgaggagaccatggaggctgtgctgtcagtcctggatgatgtgtatgcgaaacactggcactcggacagtgctggaagggtgacatctgccactatgctgctgggcctgctggtgtcctgcatgtctcttctctaagtgcattctgcccaggcctgctcaaccccagtggcatgagtgtggctggaggaacggtgtgttatggttgtaaagaaaccaaataatttaactaaaaatacttcctatttcaataaaaaaaaaaaaaaaaaaaaaaaaaaaaaaaaaaaaa

SEQ ID NO: 726 - protein, 322 aa, Homo sapiens [sequence omitted]

SEQ ID NO: 727 - DNA, 1128 bp, Homo sapiens
  CDS (1)..(1125)
accatgaagcctctgcttgaaaccctttatcttttggggatgctggttcctggagggctgggatatgatagatccttagcccaacacagacaagagattgtggacaagtcagtgagtccatggagcctggagacgtattcctataacatataccaccccatgggagagatctatgagtggatgagagagatcagtgagaagtacaaggaagtggtgacacagcatttcctaggagtgacctatgagacccaccccatgtattatctgaagatcagccaaccatctggtaatcccaagaaaatcatttggatggactgtggaattcacgccagagaatggattgctcctgctttttgccaatggttcgtcaaagaaattctacaaaaccataaagacaactcaagtatacgcaagcttcttaggaacctggacttctatgtccttccagttcttaacatagatggttatatctacacttggacaactgatcgtctttggaggaaatcccgttcaccccataataatggcacatgttttgggacggatctcaatcgaaatttcaatgcatcttggtgtagtattggtgcctctagaaactgccaagatcaaacattctgtgggacagggccagtgtctgaaccagagactaaagctgttgccagcttcatagagagcaagaaggatgatattttgtgcttcctgaccatgcactcttatgggcagttaattctcacaccttacggctacaccaaaaataaatcaagtaaccacccagaaatgattcaagttggacagaaggcagcaaatgcattgaaagcaaagtatggaaccaattatagagttggatcgagtgcagatattttatatgcctcatcagggtcttcaagagattgggcccgagacattgggattcccttctcatatacgtttgagctgagggacagtggaacgtatgggtttgttctgccagaagctcagatccagcccacctgtgaggagaccatggaggctgtgctgtcagtcctggatgatgtgtatgcgaaacactggcactcggacagtgctggaagggtgacatctgccactatgctgctgggcctgctggtgtcctgcatgtctcttctctaa

SEQ ID NO: 728 - protein, 375 aa, Homo sapiens; identical to SEQ ID NO: 706

SEQ ID NO: 729 - DNA, 1151 bp, Homo sapiens; identical to SEQ ID NO: 709
  CDS (3)..(1148)

SEQ ID NO: 730 - protein, 382 aa, Homo sapiens; identical to SEQ ID NO: 710

SEQ ID NO: 731 - DNA, 1148 bp, Homo sapiens; identical to SEQ ID NO: 707
  CDS (3)..(1145)

SEQ ID NO: 732 - protein, 381 aa, Homo sapiens; identical to SEQ ID NO: 708

SEQ ID NO: 733 - DNA, 1146 bp, Homo sapiens
  CDS (1)..(1143)
accatggtaagcgctattgttttatatgtgcttttggcggcggcggcgcattctgcctttgcgtatgatagatccttagcccaacacagacaagagattgtggacaagtcagtgagtccatggagcctggagacgtattcctataacatataccaccccatgggagagatctatgagtggatgagagagatcagtgagaagtacaaggaagtggtgacacagcatttcctaggagtgacctatgagacccaccccatgtattatctgaagatcagccaaccatctggtaatcccaagaaaatcatttggatggactgtggaattcacgccagagaatggattgctcctgctttttgccaatggttcgtcaaagaaattctacaaaaccataaagacaactcaagtatacgcaagcttcttaggaacctggacttctatgtccttccagttcttaacatagatggttatatctacacttggacaactgatcgtctttggaggaaatcccgttcaccccataataatggcacatgttttgggacggatctcaatcgaaatttcaatgcatcttggtgtagtattggtgcctctagaaactgccaagatcaaacattctgtgggacagggccagtgtctgaaccagagactaaagctgttgccagcttcatagagagcaagaaggatgatattttgtgcttcctgaccatgcactcttatgggcagttaattctcacaccttacggctacaccaaaaataaatcaagtaaccacccagaaatgattcaagttggacagaaggcagcaaatgcattgaaagcaaagtatggaaccaattatagagttggatcgagtgcagatattttatatgcctcatcagggtcttcaagagattgggcccgagacattgggattcccttctcatatacgtttgagctgagggacagtggaacgtatgggtttgttctgccagaagctcagatccagcccacctgtgaggagaccatggaggctgtgctgtcagtcctggatgatgtgtatgcgaaacactggcactcggacagtgctggaagggtgacatctgccactatgctgctgggcctgctggtgtcctgcatgtctcttctccaccatcaccaccatcactaa

SEQ ID NO: 734 - protein, 381 aa, Homo sapiens
TMVSAIVLYVLLAAAAHSAFAYDRSLAQHRQEIVDKSVSPWSLETYSYNIYHPMGEIYEWMREISEKYKEVVTQHFLGVTYETHPMYYLKISQPSGNPKKIIWMDCGIHAREWIAPAFCQWFVKEILQNHKDNSSIRKLLRNLDFYVLPVLNIDGYIYTWTTDRLWRKSRSPHNNGTCFGTDLNRNFNASWCSIGASRNCQDQTFCGTGPVSEPETKAVASFIESKKDDILCFLTMHSYGQLILTPYGYTKNKSSNHPEMIQVGQKAANALKAKYGTNYRVGSSADILYASSGSSRDWARDIGIPFSYTFELRDSGTYGFVLPEAQIQPTCEETMEAVLSVLDDVYAKHWHSDSAGRVTSATMLLGLLVSCMSLLHHHHHH

SEQ ID NO: 735 - DNA, 1161 bp, Homo sapiens
  CDS (1)..(1158)
attattatacctcccaccatcgggcgcggatccaccatggtaagcgctattgttttatatgtgcttttggcggcggcggcgcattctgcctttgcgtatgatagatccttagcccaacacagacaagagattgtggacaagtcagtgagtccatggagcctggagacgtattcctataacatataccaccccatgggagagatctatgagtggatgagagagatcagtgagaagtacaaggaagtggtgacacagcatttcctaggagtgacctatgagacccaccccatgtattatctgaagatcagccaaccatctggtaatcccaagaaaatcatttggatggactgtggaattcacgccagagaatggattgctcctgctttttgccaatggttcgtcaaagaaattctacaaaaccataaagacaactcaagtatacgcaagcttcttaggaacctggacttctatgtccttccagttcttaacatagatggttatatctacacttggacaactgatcgtctttggaggaaatcccgttcaccccataataatggcacatgttttgggacggatctcaatcgaaatttcaatgcatcttggtgtagtattggtgcctctagaaactgccaagatcaaacattctgtgggacagggccagtgtctgaaccagagactaaagctgttgccagcttcatagagagcaagaaggatgatattttgtgcttcctgaccatgcactcttatgggcagttaattctcacaccttacggctacaccaaaaataaatcaagtaaccacccagaaatgattcaagttggacagaaggcagcaaatgcattgaaagcaaagtatggaaccaattatagagttggatcgagtgcagatattttatatgcctcatcagggtcttcaagagattgggcccgagacattgggattcccttctcatatacgtttgagctgagggacagtggaacgtatgggtttgttctgccagaagctcagatccagcccacctgtgaggagaccatggaggctgtgctgtcagtcctggatgatgtgtatgcgaaacactggcactcggacagtgctggaagggtgacatctgccactatgctgctgggcctgctggtgtcctgcatgtctcttctctaa

SEQ ID NO: 736 - protein, 386 aa, Homo sapiens
IIIPPTIGRGSTMVSAIVLYVLLAAAAHSAFAYDRSLAQHRQEIVDKSVSPWSLETYSYNIYHPMGEIYEWMREISEKYKEVVTQHFLGVTYETHPMYYLKISQPSGNPKKIIWMDCGIHAREWIAPAFCQWFVKEILQNHKDNSSIRKLLRNLDFYVLPVLNIDGYIYTWTTDRLWRKSRSPHNNGTCFGTDLNRNFNASWCSIGASRNCQDQTFCGTGPVSEPETKAVASFIESKKDDILCFLTMHSYGQLILTPYGYTKNKSSNHPEMIQVGQKAANALKAKYGTNYRVGSSADILYASSGSSRDWARDIGIPFSYTFELRDSGTYGFVLPEAQIQPTCEETMEAVLSVLDDVYAKHWHSDSAGRVTSATMLLGLLVSCMSLL

SEQ ID NO: 737 - DNA, 1212 bp, Homo sapiens
  CDS (1)..(1209)
cgcggatccaccatggtaagcgctattgttttatatgtgcttttggcggcggcggcgcattctgcctttgcgaagcctctgcttgaaaccctttatcttttggggatgctggttcctggagggctgggatatgatagatccttagcccaacacagacaagagattgtggacaagtcagtgagtccatggagcctggagacgtattcctataacatataccaccccatgggagagatctatgagtggatgagagagatcagtgagaagtacaaggaagtggtgacacagcatttcctaggagtgacctatgagacccaccccatgtattatctgaagatcagccaaccatctggtaatcccaagaaaatcatttggatggactgtggaattcacgccagagaatggattgctcctgctttttgccaatggttcgtcaaagaaattctacaaaaccataaagacaactcaagtatacgcaagcttcttaggaacctggacttctatgtccttccagttcttaacatagatggttatatctacacttggacaactgatcgtctttggaggaaatcccgttcaccccataataatggcacatgttttgggacggatctcaatcgaaatttcaatgcatcttggtgtagtattggtgcctctagaaactgccaagatcaaacattctgtgggacagggccagtgtctgaaccagagactaaagctgttgccagcttcatagagagcaagaaggatgatattttgtgcttcctgaccatgcactcttatgggcagttaattctcacaccttacggctacaccaaaaataaatcaagtaaccacccagaaatgattcaagttggacagaaggcagcaaatgcattgaaagcaaagtatggaaccaattatagagttggatcgagtgcagatattttatatgcctcatcagggtcttcaagagattgggcccgagacattgggattcccttctcatatacgtttgagctgagggacagtggaacgtatgggtttgttctgccagaagctcagatccagcccacctgtgaggagaccatggaggctgtgctgtcagtcctggatgatgtgtatgcgaaacactggcactcggacagtgctggaagggtgacatctgccactatgctgctgggcctgctggtgtcctgcatgtctcttctccaccatcaccaccatcactaa

SEQ ID NO: 738 - protein, 403 aa, Homo sapiens
RGSTMVSAIVLYVLLAAAAHSAFAKPLLETLYLLGMLVPGGLGYDRSLAQHRQEIVDKSVSPWSLETYSYNIYHPMGEIYEWMREISEKYKEVVTQHFLGVTYETHPMYYLKISQPSGNPKKIIWMDCGIHAREWIAPAFCQWFVKEILQNHKDNSSIRKLLRNLDFYVLPVLNIDGYIYTWTTDRLWRKSRSPHNNGTCFGTDLNRNFNASWCSIGASRNCQDQTFCGTGPVSEPETKAVASFIESKKDDILCFLTMHSYGQLILTPYGYTKNKSSNHPEMIQVGQKAANALKAKYGTNYRVGSSADILYASSGSSRDWARDIGIPFSYTFELRDSGTYGFVLPEAQIQPTCEETMEAVLSVLDDVYAKHWHSDSAGRVTSATMLLGLLVSCMSLLHHHHHH

SEQ ID NO: 739 - DNA, 1222 bp, Homo sapiens
  CDS (41)..(1162)
ccagagaggcccagaattttctaacttactgtgtggcagaatgaagcctctgcttgaaaccctttatcttttggggatgctggttcctggagggctgggatatgatagatccttagcccaacacagacaagagattgtggacaagtcagtgagtccatggagcctggagacgtattcctataacatataccaccccatgggagagatctatgagtggatgagagagatcagtgagaagtgcaaggaagtggtgacacagcatttcctaggagtgacctatgagacccaccccatatattatctgaagatcagccaaccatctggtaatcccaagaaaatcatttggatggactgtggaattcacgccagagaatggattgctcctgctttttgccaatggttcgtcaaagaaattctacaaaaccataaagacaactcaaggatacgcaagctccttaggaacctggacttctatgtccttccagttcttaacatagatggttatatctacacttggacaactgatcgtctttggaggaaatcccgttcaccccataataatggcacatgttttgggacggatctcaatcgaaatttcaatgcttcttggtgtagtattggtgcctctagaaactgccaagatcaaacattctgtgggacagggccagtgtctgaaccagagactaaagctgttgccagcttcatagagagcaagaaggatgatattttgtgcttcctgaccatgcactcttatgggcagttaattctcacaccttacggctacaccaaaaataaatcaagtaaccacccagaaatgattcaagttggacagaaggcagcaaatgcattgaaagcaaagtatggaaccaattatagagttggatcgagtgcagatattttatatgcctcatcagggtcttcaagagattgggcccgagacattgggattcccttctcatatacgtttgagctgagggacagtggaacatatgggtttgttctgccagaagctcagatccagcccacctgtgaggagaccatggaggctgtgctgtcagtcctggatgatgtgtatgcgaaacactggcactcggacagtgctggaagggtgacatctgccactatgctgctgggcctgctggtgtcctgcatgtctcttctctaagtgcattctgcccaggcctgctcaaccccagtggcatgagtgtggcttggaggaacg

SEQ ID NO: 740 - protein, 374 aa, Homo sapiens
MKPLLETLYLLGMLVPGGLGYDRSLAQHRQEIVDKSVSPWSLETYSYNIYHPMGEIYEWMREISEKCKEVVTQHFLGVTYETHPIYYLKISQPSGNPKKIIWMDCGIHAREWIAPAFCQWFVKEILQNHKDNSRIRKLLRNLDFYVLPVLNIDGYIYTWTTDRLWRKSRSPHNNGTCFGTDLNRNFNASWCSIGASRNCQDQTFCGTGPVSEPETKAVASFIESKKDDILCFLTMHSYGQLILTPYGYTKNKSSNHPEMIQVGQKAANALKAKYGTNYRVGSSADILYASSGSSRDWARDIGIPFSYTFELRDSGTYGFVLPEAQIQPTCEETMEAVLSVLDDVYAKHWHSDSAGRVTSATMLLGLLVSCMSLL

SEQ ID NO: 741 - DNA, 1222 bp, Homo sapiens
  CDS (41)..(1162)
ccagagaggcccagaattttctaacttactgtgtggcagaatgaagcctctgcttgaaaccctttatcttttggggatgctggttcctggagggctgggatatgatagatccttagcccaacacagacaagagattgtggacaagtcagtgagtccatggagcctggagacgtattcctataacatataccaccccatgggagagatctatgagtggatgagagagatcagtgagaagtacaaggaagtggtgacacagcatttcctaggagtgacctatgagacccaccccatatattatctgaagatcagccaaccatctggtaatcccaagaaaatcatttggatggactgtggaattcacgccagagaatggattgctcctgctttttgccaatggttcgtcaaagaaattctacaaaaccataaagacaactcaaggatacgcaagctccttaggaacctggacttctatgtccttccagttcttaacatagatggttatatctacacttggacaactgatcgtctttggaggaaatcccgttcaccccataataatggcacatgttttgggacggatctcaatcgaaatttcaatgcttcttggtgtagtattggtgcctctagaaactgccaagatcaaacattctgtgggacagggccagtgtctgaaccagagactaaagctgttgccagcttcatagagagcaagaaggatgatattttgtgcttcctgaccatgcactcttatgggcagttaattctcacaccttacggctacaccaaaaataaatcaagtaaccacccagaaatgattcaagttggacagaaggcagcaaatgcattgaaagcaaagtatggaaccaattatagagttggatcgagtgcagatattttatatgcctcatcagggtcttcaagagattgggcccgagacattgggattcccttctcatatacgtttgagctgagggacagtggaacgtatgggtttgttctgccagaagctcagatccagcccacctgtgaggagaccatggaggctgtgctgtcagtcctggatgatgtgtatgcgaaacactggcactcggacagtgctggaagggtgacatctgccactatgctgctgggcctgctggtgtcctgcatgtctcttctctaagtgcattctgcccaggcctgctcaaccccagtggcatgagtgtggcttggaggaacg

SEQ ID NO: 742 - protein, 374 aa, Homo sapiens [sequence omitted]

SEQ ID NO: 743 - DNA, 1222 bp, Homo sapiens
  CDS (41)..(1162)
ccagagaggcccagaattttctaacttactgtgtggcagaatgaagcctctgcttgaaaccctttatcttttggggatgctggttcctggagggctgggatatgatagatccttagcccaacacagacaagagattgtggacaagtcagtgagtccatggagcctggagacgtattcctataacatataccaccccatgggagagatctatgagtggatgagagagatcagtgagaagtacaaggaagtggtgacacagcatttcctaggagtgacctatgagacccaccccatatattatctgaagatcagccaaccatctggtaatcccaagaaaatcatttggatggactgtggaattcacgccagagaatggattgctcctgctttttgccaatggttcgtcaaagaaattctacaaaaccataaagacaactcaaggatacgcaagctccttaggaacctggacttctatgtccttccagttcttaacatagatggttatatctacacttggacaactgatcgtctttggaggaaatcccgttcaccccataataatggcacatgttttgggacggatctcaatcgaaatttcaatgcttcttggtgtagtattggtgcctctagaaactgccaagatcaaacattctgtgggacagggccagtgtctgaaccagagactaaagctgttgccagcttcatagagagcaagaaggatgatattttgtgcttcctgaccatgcactcttatgggcagttaattctcacaccttacggctacaccaaaaataaatcaagtaaccacccagaaatgattcaagttggacagaaggcagcaaatgcattgaaagcaaagtatggaaccaattatagagttggatcgagtgcagatattttatatgcctcatcagggtcttcaagagattgggcccgagacattgggattcccttctcatatacgtttgagctgagggacagtggaacatatgggtttgttctgccagaagctcagatccagcccacctgtgaggagaccatggaggctgtgctgtcagtcctggatgatgtgtatgcgaaacactggcactcggacagtgctggaagggtgacatctgccactatgctgctgggcctgctggtgtcctgcacgtctcttctctaagtgcattctgcccaggcctgctcaaccccagtggcatgagtgtggcttggaggaacg

SEQ ID NO: 744 - protein, 374 aa, Homo sapiens
MKPLLETLYLLGMLVPGGLGYDRSLAQHRQEIVDKSVSPWSLETYSYNIYHPMGEIYEWMREISEKYKEVVTQHFLGVTYETHPIYYLKISQPSGNPKKIIWMDCGIHAREWIAPAFCQWFVKEILQNHKDNSRIRKLLRNLDFYVLPVLNIDGYIYTWTTDRLWRKSRSPHNNGTCFGTDLNRNFNASWCSIGASRNCQDQTFCGTGPVSEPETKAVASFIESKKDDILCFLTMHSYGQLILTPYGYTKNKSSNHPEMIQVGQKAANALKAKYGTNYRVGSSADILYASSGSSRDWARDIGIPFSYTFELRDSGTYGFVLPEAQIQPTCEETMEAVLSVLDDVYAKHWHSDSAGRVTSATMLLGLLVSCTSLL

SEQ ID NO: 745 - DNA, 1222 bp, Homo sapiens
  CDS (41)..(1162)
ccagagaggcccagaattttctaacttactgtgtggcagaatgaagcctctgcttgaaaccctttatcttttggggatgctggttcctggagggctgggatatgatagatccttagcccaacacagacaagagattgtggacaagtcagtgagtccatggagcctggagacgtattcctataacatataccaccccatgggagagatctatgagtggatgagagagatcagtgagaagtacaaggaagtggtgacacagcatttcctaggagtgacctatgagacccaccccatatattatctgaagatcagccaaccatctggtaatcccaagaaaatcatttggatggactgtggaattcacgccagagaatggattgctcctgctttttgccaatggttcgtcaaagaaattctacaaaaccataaagacaactcaaggatacgcaagctccttaggaacctggacttctatgtccttccagttcttaacatagatggttatatctacacttggacaactgatcgtctttggaggaaatcccgttcaccccataataatggcacatgttttgggacggatctcaatcgaaatttcaatgcttcttggtgtagtattggtgcctctagaaactgccaagatcaaacattctgtgggacagggccagtgtctgaaccagagactaaagctgttgccagcttcatagagagcaagaaggatgatattttgtgcttcctgaccatgcactcttatgggcagttaattctcacaccttacggctacaccaaaaataaatcaagtaaccacccagaaatgattcaagttggacagaaggcagcaaatgcattgaaagcaaagtatggaaccaattatagagttggatcgagtgcagatattttatatgcctcatcagggtcttcaagagattgggcccgagacattgggattcccttctcatatacgtttgagctgagggacagtggaacatatgggtttgttctgccagaagctcagatccagcccacctgtgaggagaccatggaggctgtgctgtcagtcctggatgatgtgtatgcgaaacactggcactcggacagtgctggaagggtgacatctgccactatgctgctgggcctgctggtgtcctgcatgtctcttccctaagtgcattctgcccaggcctgctcaaccccagtggcatgagtgtggcttggaggaacg

SEQ ID NO: 746 - protein, 374 aa, Homo sapiens
MKPLLETLYLLGMLVPGGLGYDRSLAQHRQEIVDKSVSPWSLETYSYNIYHPMGEIYEWMREISEKYKEVVTQHFLGVTYETHPIYYLKISQPSGNPKKIIWMDCGIHAREWIAPAFCQWFVKEILQNHKDNSRIRKLLRNLDFYVLPVLNIDGYIYTWTTDRLWRKSRSPHNNGTCFGTDLNRNFNASWCSIGASRNCQDQTFCGTGPVSEPETKAVASFIESKKDDILCFLTMHSYGQLILTPYGYTKNKSSNHPEMIQVGQKAANALKAKYGTNYRVGSSADILYASSGSSRDWARDIGIPFSYTFELRDSGTYGFVLPEAQIQPTCEETMEAVLSVLDDVYAKHWHSDSAGRVTSATMLLGLLVSCMSLP

SEQ ID NO: 747 - DNA, 1300 bp, Homo sapiens
  CDS (20)..(1273)
tgactgtatcgccggattcatgcagcgcgtgaacatgatcatggcagaatcaccaggcctcatcaccatctgccttttaggatatctactcagtgctgaatgtacagtttttcttgatcatgaaaacgccaacaaaattctgaatcggccaaagaggtataattcaggtaaattggaggagtttgttcatgggaaccttgagagagaatgtatggaagaaaagtgcagttttgaagaagcacgagaagtttttgaaaacactgaaagaacaactgaattttggaagcagtatgttgatggagatcagtgtgagtccaatccatgtttaaatggcggcagttgcaaggatgtcattaattcctatgaatgttggtgtccctttggatttgaaggaaagaactgtgaattagtgccatttccatgtggaagagtttctgtttcacaaacttctaagctcacccgtgctgagactgtttttcctgatgtggactatgtaaattctactgaagctgaaaccattttggataacatcactcaaagcacccaatcatttaatgacttcactcgggttgttggtggagaagatgccaaaccaggtcaattcccttggcaggttgttttgaatggtaaagttgatgcattctgtggaggctctatcgttaatgaaaaatggattgtaactgctgcccactgtgttgaaactggtgttaaaattacagttgtcgcaggtgaacataatattgaggagacagaacatacagagcaaaagcgaaatgtgattcgaattattcctcaccacaactacaatgcagctattaataagtacaaccatgacattgcccttctggaactggacgaacccttagtgctaaacagctacgttacacctatttgcattgctgacaaggaatacacgaacatcttcctcaaatttggatctggctatgtaagtggctggggaagagtcttccacaaagggagatcagctttagttcttcagtaccttagagttccacttgttgaccgagccacatgtcttcgatctacaaagttcaccatctataacaacatgttctgtgctggcttccatgaaggaggtagagattcatgtcaaggagatagtgggggaccccatgttactgaagtggaagggaccagtttcttaactggaattattagctggggtgaagagtgtgcaatgaaaggcaaatatggaatatataccaaggtatcccggtatgtcaactggattaaggaaaaaacaaagctcacttgactgcagccaagctaattccggaag

SEQ ID NO: 748 - protein, 418 aa, Homo sapiens
MQRVNMIMAESPGLITICLLGYLLSAECTVFLDHENANKILNRPKRYNSGKLEEFVHGNLERECMEEKCSFEEAREVFENTERTTEFWKQYVDGDQCESNPCLNGGSCKDVINSYECWCPFGFEGKNCELVPFPCGRVSVSQTSKLTRAETVFPDVDYVNSTEAETILDNITQSTQSFNDFTRVVGGEDAKPGQFPWQVVLNGKVDAFCGGSIVNEKWIVTAAHCVETGVKITVVAGEHNIEETEHTEQKRNVIRIIPHHNYNAAINKYNHDIALLELDEPLVLNSYVTPICIADKEYTNIFLKFGSGYVSGWGRVFHKGRSALVLQYLRVPLVDRATCLRSTKFTIYNNMFCAGFHEGGRDSCQGDSGGPHVTEVEGTSFLTGIISWGEECAMKGKYGIYTKVSRYVNWIKEKTKLT

SEQ ID NO: 749 - DNA, 1438 bp, Homo sapiens
  CDS (2)..(1183)
tatgcagcgcgtgaacatgatcatggcagaatcaccaggcctcatcaccatctgccttttaggatatctactcagtgctgaatgtacagtttttcttgatcatgaaaacgccaacaaaattctgaatcggccaaagaggtataattcaggtaaattggaagagtttgttcaagggaaccttgagagagaatgtctggaggaaaagtgtagttttgaagaagcacgagaagtttttgaaaacactgaaagaacaactgaattttggaagcagtatgttgatggagatcagtgtgagtccaatccatgtttaaatggcggcagttgcaaggatgacattaattcctatgaatgttggtgtccctttggatttgaaggaaagaactgtgaattagatgtggactatgtaaattctactgaagctgaaaccattttggataacatcactcaaagcacccaatcatttaatgacttcactcgggttgttggtggagaagatgccaaaccaggtcaattcccttggcaggttgttttgaatggtaaagttgatgcattctgtggaggctctatcgttaatgaaaaatggattgtaactgctgcccactgtgttgaaactggtgttaaaattacagttgtcgcaggtgaacataatattgaggagacagaacatacagagcaaaagcgaaatgtgattcgaattattcctcaccacaactacaatgcagctattaataagtacaaccatgacattgcccttctggaactggacgaacccttagtgctaaacagctacgttacacctatttgcattgctgacaaggaatacacgaacatcttcctcaaatttggatctggctatgtaagtggctggggaagagtcttccacaaagggagatcagctttagttcttcagtaccttagagttccacttgttgaccgagccacatgtcttcgatctacaaagttcaccatctataacaacatgttctgtgctggcttccatgaaggaggtagagattcatgtcaaggagatagtgggggaccccatgttactgaagtggaagggaccagtttcttaactggaattattagctggggtgaagagtgtgcaatgaaaggcaaatatggaatatataccaaggtatcccggtatgtcaactggattaaggaaaaaacaaagctcacttaatgaaagatggatttccaaggttaattcattggaattgaaaattaacagggcctctcactaactaatcactttcccatcttttgttagatttgaatatatacattctatgatcattgctttttctctttacaggggagaatttcatattttacctgagcaaattgattagaaaatggaaccactagaggaatataatgtgttaggaaattacagtcatttctaagggcccagccttgacaaattgtgagtaaa

SEQ ID NO: 750 - protein, 394 aa, Homo sapiens
MQRVNMIMAESPGLITICLLGYLLSAECTVFLDHENANKILNRPKRYNSGKLEEFVQGNLERECLEEKCSFEEAREVFENTERTTEFWKQYVDGDQCESNPCLNGGSCKDDINSYECWCPFGFEGKNCELDVDYVNSTEAETILDNITQSTQSFNDFTRVVGGEDAKPGQFPWQVVLNGKVDAFCGGSIVNEKWIVTAAHCVETGVKITVVAGEHNIEETEHTEQKRNVIRIIPHHNYNAAINKYNHDIALLELDEPLVLNSYVTPICIADKEYTNIFLKFGSGYVSGWGRVFHKGRSALVLQYLRVPLVDRATCLRSTKFTIYNNMFCAGFHEGGRDSCQGDSGGPHVTEVEGTSFLTGIISWGEECAMKGKYGIYTKVSRYVNWIKEKTKLT

SEQ ID NO: 751 - DNA, 2807 bp, Homo sapiens
  CDS (20)..(1402)
caatctgctagcaaaggttatgcagcgcgtgaacatgatcatggcagaatcaccaggcctgatcaccatctgccttttaggatatctactcagtgctgaatgtacagtttttcttgatcatgaaaacgccaacaaaattctgaatcggccaaagaggtataattcaggtaaattggaagagtttgttcaagggaaccttgagagagaatgtatggaagaaaagtgtagttttgaagaagcacgagaagtttttgaaaacactgaaagaacaactgaattttggaagcagtatgttgatggagatcagtgtgagtccaatccatgtttaaatggcggcagttgcaaggatgacattaattcctatgaatgttggtgtccctttggatttgaaggaaagaactgtgaattagatgtaacatgtaacattaagaatggcagatgcgagcagttttgtaaaaatagtgctgataacaaggtggtttgctcctgtactgagggatatcgacttgcagaaaaccagaagtcctgtgaaccagcagtgccatttccatgtggaagagtttctgtttcacaaacttctaagctcacccgtgctgagactgtttttcctgatgtggactatgtaaattctactgaagctgaaaccattttggataacatcactcaaagcacccaatcatttaatgacttcactcgggttgttggtggagaagatgccaaaccaggtcaattcccttggcaggttgttttgaatggtaaagttgatgcattctgtggaggctctatcgttaatgaaaaatggattgtaactgctgcccactgtgttgaaactggtgttaaaattacagttgtcgcaggtgaacataatattgaggagacagaacatacagagcaaaagcgaaatgtgattcgaattattcctcaccacaactacaatgcagctattaataagtacaaccatgacattgcccttctggaactggacgaacccttagtgctaaacagctacgttacacctatttgcattgctgacaaggaatacacgaacatcttcctcaaatttggatctggctatgtaagtggctggggaagagtcttccacaaagggagatcagctttagttcttcagtaccttagagttccacttgttgaccgagccacatgtcttcgatctacaaagttcaccatctataacaacatgttctgtgctggcttccatgaaggaggtagagattcatgtcaaggagatagtgggggaccccatgttactgaagtggaagggaccagtttcttaactggaattattagctggggtgaagagtgtgcaatgaaaggcaaatatggaatatataccaaggtatcccggtatgtcaactggattaaggaaaaaacaaagctcacttaatgaaagatggatttccaaggttaattcattggaattgaaaattaacagggcctctcactaactaatcactttcccatcttttgttagatttgaatatatacattctatgatcattgctttttctctttacaggggagaatttcatattttacctgagcaaattgattagaaaatggaaccactagaggaatataatgtgttaggaaattacagtcatttctgaagcccagcccttgacaaaattgtgaagttaaattctccactctgtccatcagatactatggttctccactatggcaactaactcactcaattttccctccttagcagcattccatcttcccgatcttctttgcttctccaaccaaaacatcatgtttattagttctgtatacagtacaggatctttggtctactctatcacgagaaggctcagtaccacactcatgaagaaagaacacaggagtagctgagaggctaaaactcatcaaaaacactactccttttcctctaccctattcctcaatcttttaccttttccaaattcccaattccccaaatcagtttttctctttcttactccctctctcccttttaccctccatggtcgttaaaggagagatggggagcatcattctgttatacttctgtacacagttatacatgtctatcaaacccagacttgcttccatagtggagacttgcttttcagaacatagggatgaagtaaggtgcctgaaaagtttgggggaaaagtttctttcagagagttaagttattttatatatataatatatatataaaatatataatatacaatataaatatatagtgtgtgtgtgtatgcgtgtgtgtagacacacacgcatacacacatataatggaagcaataagccattcttaagagcttgtatggttatgcaggtctgactaggcatgatttcacgaaggcaagattggcatatcagttgtaactaaaaaagctgacattgacccagacatattgtactctttctaaaaataataataataatgctaacagaaagaagagaaccgttcgtttgcaatctacagctagtagagacttgaggaagaattcaacagtgtgtcttcagcagtgttcagagccaagcaagaagttgaagttgcctagaccagaggacataagtatcatgtctcctttaactagcataccccgaagtggagaaggatgcagcaggctcaaaggcataagtcattccaatcagccaactaagttgtccttttctggtttcgtgttcaccatggaacattttgattatagttaatccttctatcttgaatcttctagagagttgctgaccaactgacgtatgtttccctttgtgaattaataaactggtgttctggttcaaaaaaaaaa

SEQ ID NO: 752 - protein, 461 aa, Homo sapiens
MQRVNMIMAESPGLITICLLGYLLSAECTVFLDHENANKILNRPKRYNSGKLEEFVQGNLERECMEEKCSFEEAREVFENTERTTEFWKQYVDGDQCESNPCLNGGSCKDDINSYECWCPFGFEGKNCELDVTCNIKNGRCEQFCKNSADNKVVCSCTEGYRLAENQKSCEPAVPFPCGRVSVSQTSKLTRAETVFPDVDYVNSTEAETILDNITQSTQSFNDFTRVVGGEDAKPGQFPWQVVLNGKVDAFCGGSIVNEKWIVTAAHCVETGVKITVVAGEHNIEETEHTEQKRNVIRIIPHHNYNAAINKYNHDIALLELDEPLVLNSYVTPICIADKEYTNIFLKFGSGYVSGWGRVFHKGRSALVLQYLRVPLVDRATCLRSTKFTIYNNMFCAGFHEGGRDSCQGDSGGPHVTEVEGTSFLTGIISWGEECAMKGKYGIYTKVSRYVNWIKEKTKLT

SEQ ID NO: 753 - DNA, 1612 bp, Homo sapiens
  CDS (22)..(1404)
ttgactgtatcgccggaattcatgcagcgcgtgaacatgatcatggcagaatcaccaggcctcatcaccatctgccttttaggatatctactcagtgctgaatgtacagtttttcttgatcatgaaaacgccaacaaaattctgaatcggccaaagaggtataattcaggtaaattggaagagtttgttcaagggaaccttgagagagaatgtatggaagaaaagtgtagttttgaagaagcacgagaagtttttgaaaacactgaaagaacaactgaattttggaagcagtatgttgatggagatcagtgtgagtccaatccatgtttaaatggcggcagttgcaaggatgacattaattcctatgaatgttggtgtccctttggatttgaaggaaagaactgtgaattagatgtaacatgtaacattaagaatggcagatgcgagcagttttgtaaaaatagtgctgataacaaggtggtttgctcctgtactgagggatatcgacttgcagaaaaccagaagtcctgtgaaccagcagtgccatttccatgtggaagagtttctgtttcacaaacttctaagctcacccgtgctgagactgtttttcctgatgtggactatgtaaattctactgaagctgaaaccattttggataacatcactcaaagcacccaatcatttaatgacttcactcgggttgttggtggagaagatgccaaaccaggtcaattcccttggcaggttgttttgaatggtaaagttgatgcattctgtggaggctctatcgttaatgaaaaatggattgtaactgctgcccactgtgttgaaactggtgttaaaattacagttgtcgcaggtgaacataatattgaggagacagaacatacagagcaaaagcgaaatgtgattcgaattattcctcaccacaactacaatgcagctattaataagtacaaccatgacattgcccttctggaactggacgaacccttagtgctaaacagctacgttacacctatttgcattgctgacaaggaatacacgaacatcttcctcaaatttggatctggctatgtaagtggctggggaagagtcttccacaaagggagatcagctttagttcttcagtaccttagagttccacttgttgaccgagccacatgtcttcgatctacaaagttcaccatctataacaacatgttctgtgctggcttccatgaaggaggtagagattcatgtcaaggagatagtgggggaccccatgttactgaagtggaagggaccagtttcttaactggaattattagctggggtgaagagtgtgcaatgaaaggcaaatatggaatatataccaaggtatcccggtatgtcaactggattaaggaaaaaacaaagctcacttaatgaaagatggatttccaaggttaattcattgaaattgaaaattaatagggcctctcactaactaatcactttcccatcttttgttagatttgaatatatacattctatgatcattgctttttctctttacaggggagaatttcatattttacctgagcaaattgattagaaaatggaaccactagaggaatataatgtgttagga

SEQ ID NO: 754 - protein, 461 aa, Homo sapiens; identical to SEQ ID NO: 752

SEQ ID NO: 755 - DNA, 1300 bp, Homo sapiens
  CDS (20)..(1273)
tgactgtatcgccggattcatgcagcgcgtgaacatgatcatggcagaatcaccaggcctcatcaccatctgccttttaggatatctactcagtgctgaatgtacagtttttcttgatcatgaaaacgccaacaaaattctgaatcggccaaagaggtataattcaggtaaattggaggagtttgttcatgggaaccttgagagagaatgtatggaagaaaagtgcagttttgaagaagcacgagaagtttttgaaaacactgaaagaacaactgaattttggaagcagtatgttgatggagatcagtgtgagtccaatccatgtttaaatggcggcagttgcaaggatgtcattaattcctatgaatgttggtgtccctttggatttgaaggaaagaactgtgaattagtgccatttccatgtggaagagtttctgtttcacaaacttctaagctcacccgtgctgaggctgtttttcctgatgtggactatgtaaattctactgaagctgaaaccattttggataacatcactcaaagcacccaatcatttaatgacttcactcgggttgttggtggagaagatgccaaaccaggtcaattcccttggcaggttgttttgaatggtaaagttgatgcattctgtggaggctctatcgttaatgaaaaatggattgtaactgctgcccactgtgttgaaactggtgttaaaattacagttgtcgcaggtgaacataatattgaggagacagaacatacagagcaaaagcgaaatgtgattcgaattattcctcaccacaactacaatgcagctattaataagtacaaccatgacattgcccttctggaactggacgaacccttagtgctaaacagctacgttacacctatttgcattgctgacaaggaatacacgaacatcttcctcaaatttggatctggctatgtaagtggctggggaagagtcttccacaaagggagatcagctttagttcttcagtaccttagagttccacttgttgaccgagccacatgtcttcgatctacaaagttcaccatctataacaacatgttctgtgctggcttccatgaaggaggtagagattcatgtcaaggagatagtgggggaccccatgttactgaagtggaagggaccagtttcttaactggaattattagctggggtgaagagtgtgcaatgaaaggcaaatatggaatatataccaaggtatcccggtatgtcaactggattaaggaaaaaacaaagctcacttgactgcagccaagctaattccggaag

SEQ ID NO: 756 - protein, 418 aa, Homo sapiens
MQRVNMIMAESPGLITICLLGYLLSAECTVFLDHENANKILNRPKRYNSGKLEEFVHGNLERECMEEKCSFEEAREVFENTERTTEFWKQYVDGDQCESNPCLNGGSCKDVINSYECWCPFGFEGKNCELVPFPCGRVSVSQTSKLTRAEAVFPDVDYVNSTEAETILDNITQSTQSFNDFTRVVGGEDAKPGQFPWQVVLNGKVDAFCGGSIVNEKWIVTAAHCVETGVKITVVAGEHNIEETEHTEQKRNVIRIIPHHNYNAAINKYNHDIALLELDEPLVLNSYVTPICIADKEYTNIFLKFGSGYVSGWGRVFHKGRSALVLQYLRVPLVDRATCLRSTKFTIYNNMFCAGFHEGGRDSCQGDSGGPHVTEVEGTSFLTGIISWGEECAMKGKYGIYTKVSRYVNWIKEKTKLT

SEQ ID NO: 757 - DNA, 1300 bp, Homo sapiens
tgactgtatcgccggattcatgcagcgcgtgaacatgatcatggcagaatcaccaggcctcatcaccatctgccttttaggatatctactcagtgctgaatgtacagtttttcttgatcatgaaaacgccaacaaaattctgaatcggccaaagaggtataattcaggtaaattggaggagtttgttcatgggaaccttgagagagaatgtatggaagaaaagtgcagttttgaagaagcacgagaagtttttgaaaacactgaaagaacaactgaattttggaagcagtatgttgatggagatcagtgtgagtccaatccatgtttaaatggcggcagttgcaaggatgtcattaattcctatgaatgttggtgtccctttggatttgaaggaaagaactgtgaattagtgccatttccatgtggaagagtttctgtttcacaaacttctaagctcacccgtgctgagactgtttttcctgatgtggactatgtaaattctactgaagctgaaaccattttggataacatcactcaaagcacccaatcatttaatgacttcactcgggttgttggtggagaagatgccaaaccaggtcaattcccttggcaggttgttttgaatggtaaagttgatgcattctgtggaggctctatcgttaatgaaaaatgaattgtaactgctgcccactgtgttgaaactggtgttaaaattacagttgtcgcaggtgaacataatattgaggagacagaacatacagagcaaaagcgaaatgtgattcgaattattcctcaccacaactacaatgcagctattaataagtacaaccatgacattgcccttctggaactggacgaacccttagtgctaaacagctacgttacacctatttgcattgctgacaaggaatacacgaacatcttcctcaaatttggatctggctatgtaagtggctggggaagagtcttccacaaagggagatcagctttagttcttcagtaccttagagttccacttgttgaccgagccacatgtcttcgatctacaaagttcaccatctataacaacatgttctgtgctggcttccatgaaggaggtagagattcatgtcaaggagatagtgggggaccccatgttactgaagtggaagggaccagtttcttaactggaattattagctggggtgaagagtgtgcaatgaaaggcaaatatggaatatataccaaggtatcccggtatgtcaactggattaaggaaaaaacaaagctcacttgactgcagccaagctaattccggaag

SEQ ID NO: 758 - protein, 417 aa, Homo sapiens
MQRVNMIMAESPGLITICLLGYLLSAECTVFLDHENANKILNRPKRYNSGKLEEFVHGNLERECMEEKCSFEEAREVFENTERTTEFWKQYVDGDQCESNPCLNGGSCKDVINSYECWCPFGFEGKNCELVPFPCGRVSVSQTSKLTRAETVFPDVDYVNSTEAETILDNITQSTQSFNDFTRVVGGEDAKPGQFPWQVVLNGKVDAFCGGSIVNEKIVTAAHCVETGVKITVVAGEHNIEETEHTEQKRNVIRIIPHHNYNAAINKYNHDIALLELDEPLVLNSYVTPICIADKEYTNIFLKFGSGYVSGWGRVFHKGRSALVLQYLRVPLVDRATCLRSTKFTIYNNMFCAGFHEGGRDSCQGDSGGPHVTEVEGTSFLTGIISWGEECAMKGKYGIYTKVSRYVNWIKEKTKLT

SEQ ID NO: 759 - DNA, 1439 bp, Homo sapiens
  CDS (35)..(1405)
tcatccacagccatcatataaaggttttggcatcatgtttgggaagaaaaagaaaaagattgaaatatctggcccgtccaactttgaacacagggttcatactgggtttgatccacaagagcagaagtttaccggccttccccagcagtggcacagcctgttagcagatacggccaacaggccaaagcctatggtggacccttcatgcatcacacccatccagctggctcctatgaaggtggattacgatcgagcacagatggtcctcagccctccactgtcagggtctgacacctaccccaggggccctgccaaactacctcaaagtcaaagcaaatcgggctattcctcaagcagtcaccagtacccgtctgggtaccacaaagccaccttgtaccatcacccctccctgcagagcagttcgcagtacatctccacggcttcctacctgagctccctcagcctctcatccagcacctacccgccgcccagctggggctcctcctccgaccagcagccctccagggtgtcccatgaacagtttcgggcggccctgcagctggtggtcagcccaggagaccccagggaatacttggccaactttatcaaaatcggggaaggctcaaccggcatcgtatgcatcgccaccgagaaacacacagggaaacaagttgcagtgaagaaaatggacctccggaagcaacagagacgagaactgcttttcaatgaggtcgtgatcatgcgggattaccaccatgacaatgtggttgacatgtacagcagctaccttgtcggcgatgagctctgggtggtcatggagtttctagaaggtggtgccttgacagacattgtgactcacaccagaatgaatgaagaacagatagctactgtctgcctgtcagttctgagagctctctcctaccttcataaccaaggagtgattcacagggacataaaaagtgactccattctcctgacaagcgatggccggataaagttgtctgattttggtttctgtgctcaagtttccaaagaggtgccgaagaggaaatcattggttggcactccctactggatggcccctgaggtgatttctaggctaccttatgggacagaggtggacatctggtccctcgggatcatggtgatagaaatgattgatggcgagcccccctacttcaatgagcctcccctccaggcgatgcggaggatccgggacagtttacctccaagagtgaaggacctacacaaggtttcttcagtgctccggggattcctagacttgatgttggtgagggagccctctcagagagcaacagcccaggaactcctcggacatccattcttaaaactagcaggtccaccgtcttgcatcgtccccctcatgagacaatacaggcatcactgagcagaggattcgtgtaggtggcaaagctaga

SEQ ID NO: 760 - protein, 457 aa, Homo sapiens
MFGKKKKKIEISGPSNFEHRVHTGFDPQEQKFTGLPQQWHSLLADTANRPKPMVDPSCITPIQLAPMKVDYDRAQMVLSPPLSGSDTYPRGPAKLPQSQSKSGYSSSSHQYPSGYHKATLYHHPSLQSSSQYISTASYLSSLSLSSSTYPPPSWGSSSDQQPSRVSHEQFRAALQLVVSPGDPREYLANFIKIGEGSTGIVCIATEKHTGKQVAVKKMDLRKQQRRELLFNEVVIMRDYHHDNVVDMYSSYLVGDELWVVMEFLEGGALTDIVTHTRMNEEQIATVCLSVLRALSYLHNQGVIHRDIKSDSILLTSDGRIKLSDFGFCAQVSKEVPKRKSLVGTPYWMAPEVISRLPYGTEVDIWSLGIMVIEMIDGEPPYFNEPPLQAMRRIRDSLPPRVKDLHKVSSVLRGFLDLMLVREPSQRATAQELLGHPFLKLAGPPSCIVPLMRQYRHH

SEQ ID NO: 761 - DNA, 4796 bp, Homo sapiens
  CDS (549)..(1832)
  misc_feature (1)..(1): Wherein n may be a, c, g or t
ncgaaaacccggagcagctgcgtacgctcatggacagtcctccgaggggcgaagccgggcagctgggcatgctcagtagctgggggaggtttgggtggagagtagaaagctgtggctctgcctctcatcccctcccgctggcccccgccccccttgcccctacccagccagtagtagttccccagcgtgcgcccggggagaccgggaacatggcgctgggagcgctgtagcagctgagaaggggctgaggcaccgccgcttcgctgacagccggccaccagatgttcatgcattctagagaaagtggaaaacttagaagcctaattaatgactgtcttctggacctctgagaccatgtttctagtgttttccgtggaatattatcagaaatacactgtggtgaaatgcttccacctcttgctaaaatgaacactgaggaaaaatgaagaagactgacaagcaccagcgaaaagttgcagaatagaaatagccacactcctctggagtctttaattcatccacagccatcatataaaggttttggcatcatgtttgggaagaaaaagaaaaagattgaaatatctggcccgtccaactttgaacacagggttcatactgggtttgatccacaagagcagaagtttaccggccttccccagcagtggcacagcctgttagcagatacggccaacaggccaaagcctatggtggacccttcatgcatcacacccatccagctggctcctatgaagacaatcgttagaggaaacaaaccctgcaaggaaacctccatcaacggcctgctagaggattttgacaacatctcggtgactcgctccaactccctaaggaaagaaagcccacccaccccagatcagggagcctccagccacggtccaggccacgcggaagaaaatggcttcatcaccttctcccagtattccagcgaatccgatactactgctgactacacgaccgaaaagtacagggagaagagtctctatggagatgatctggatccgtattatagaggcagccacgcagccaagcaaaatgggcacgtaatgaaaatgaagcacggggaggcctactattctgaggtgaagcctttgaaatccgattttgccagattttctgccgattatcactcacatttggactcactgagcaaaccaagtgaatacagtgacctcaagtgggagtatcagagagcctcgagtagctcccctctggattattcattccaattcacaccttctagaactgcagggaccagcgggtgctccaaggagagcctggcgtacagtgaaagtgaatggggacccagcctggatgactatgacaggaggccaaagtcttcgtacctgaatcagacaagccctcagcccaccatgcggcagaggtccaggtcaggctcgggactccaggaaccgatgatgccatttggagcaagtgcatttaaaacccatccccaaggacactcctacaactcctacacctaccctcgcttgtccgagcccacaatgtgcattccaaaggtggattacgatccagcacagatggtcctcagccctccactgtcagggtctgacacctaccccaggggccctgccaaactacctcaaagtcaaagcaaatcgggctattcctcaagcagtcaccagtacccgtctgggtaccacaaagccaccttgtaccatcacccctccctgcagagcagttcgcagtacatctccacggcttcctacctgagctccctcagcctctcatccagcatacccgccgcccagctggggctcctcctccgaccagcagccctccagggtgtcccatgaacagtttcgggcggccctgcagctggtggtcagcccaggagaccccagggaatacttggccaactttatcaaaatcggggaaggctcaaccggcatcgtatgcatcgccaccgagaaacacacagggaaacaagttgcagtgaagaaaatggacctccggaagcaacagagacgagaactgcttttcaatgaggtcgtgatcatgcgggattaccaccatgacaatgtggttgacatgtacagcagctaccttgtcggcgatgagctctgggtggtcatggagtttctagaaggtggtgccttgacagacattgtgactcacaccagaatgaatgaagaacagatagctactgtctgcctgtcagttctgagagctctctcctaccttcataaccaaggagtgattcacagggacataaaaagtgactccatcctcctgacaagcgatggccggataaagttgtctgattttggtttctgtgctcaagtttccaaagaggtgccgaagaggaaatcattggttggcactccctactggatggcccctgaggtgatttctaggctaccttatgggacagaggtggacatctggtccctcgggatcatggtgatagaaatgattgatggcgagcccccctacttcaatgagcctcccctccaggcgatgcggaggatccgggacagtttacctccaagagtgaaggacctacacaaggtttcttcagtgctccggggattcctagacttgatgttggtgagggagccctctcagagagcaacagcccaggaactcctcggacatccattcttaaaactagcaggtccaccgtcttgcatcgtccccctcatgagacaatacaggcatcactgagcagaggattcgtgtaggtggcaaagctagatgaggacatgagaataattcaggagaacaaaaggaaacacagaacatgcaaaaggcctgtgcattctagaccagccaattggtgggacagcgtgatgaccggcagggttcaacagaccagggcatcttcttgtgtcttaaacaggcatctctccactgacagccggtgtggtcacttggagcacggctttaataagtcattattatatttttcagcccttcatccagcaaatcagaaggactcagtacaaactccgttatgatatatcctagccacatgcagggtaacatgtaggattttctatattgaaagaatacttttctggcaaaaaaaaaaaaaaaaagaaagaaaggaaaacaaaaagcacttttttcttaatggtagcagtataatgtattttgcaacgaatttgtaatttttctgtacgatagttttgataatttatagtactttgatgtcatgtagccattgtatcagttgaagtaatacttgtttactagaggagtttgaacaaagcctttcctacttttttatccctttaagagaaccaatgattctttaggaactttgaatactgaatgactctcaatcaccgtcagctttagtaaaatctctttcttatcctaacaagtgtcttatttggtggaagaagaattaagagtgatggtgatggtgtgcacgtttcattaatccaaccaaaaataatgaaataaaatttgagccacagtataccactccttgggataaagttaaatatttttaaagatcacattttccatgaacgcctctagtagcaaaccattcttttgcacaccacaatgtttccctcagtgccctttctcaaatgggtacaatgttcccttgtggccaaatttccctcccagggagcaatttcagtgctaggatcattggattcagttcccaaaatagaatgtttcagtgagaccatgagaattccaggctcacagagggagaggagagaacagggcaagacgtttggtttcatttgtcaccatttttaaaactctgtatgctagcacaccaaactcttgtctatatttacctttgtaccacagtattaatcgctattgttcatgtatcgtgctggaagtctgaactgactctagaggatgaattagcaagagggtattttaccaggtatgatctgacttcagttgtgcccatgttataatgtgtttccgacataggagagtcgtgctgctgtctagatcttcttgaatgttgataaaaatgaatgactactacaatacattttgtgttgcttgttggatgaatttgcatgttaactgtaggccaatatagatttgcctttaaaactctggaagagctacatagtcatcattagtttctattaattatgcatcagacaaaagccatttgttaccaaactgggaaaacagaggcttttcttaactatttcacatactgtaacaaatatgaatttaaatttgtgatagcgctctggttgctctaagcataattaagaatttttgtaattaataggttgctaattatttatcactgctaaaaaggaaaaaaggcataaaatgaccttctactgattagattttcagttttctttcaaactggaaatgcctccataaatatgatctatgattttgcttcataaaacagcaaatcaatgttttatgtaaaatattaaagcattaatataaatatgtgagaataaaaacaatctaaatccagaaaatggcagtcctaaatgttcatgagacagattgtattaatttaaccaggactatgtagaagtagaaagaaaagaaaaagaaaatcttttttaaaccagaataaacattaaaaactattgcagaaaatagtggattttggattccaaacattttcgacagtgtaatggaaatttttctgtaattttcttaccatcgggtattttttaaagtattcattgagtttaccaaaagttactgtagcttaaaaggttttgtgagcactaactattggcagaaactgcatttgcaaataaaaataaatgtttgccttttaaaaaaaaaaaaaaaaa

SEQ ID NO: 762 - protein, 428 aa, Homo sapiens
MFGKKKKKIEISGPSNFEHRVHTGFDPQEQKFTGLPQQWHSLLADTANRPKPMVDPSCITPIQLAPMKTIVRGNKPCKETSINGLLEDFDNISVTRSNSLRKESPPTPDQGASSHGPGHAEENGFITFSQYSSESDTTADYTTEKYREKSLYGDDLDPYYRGSHAAKQNGHVMKMKHGEAYYSEVKPLKSDFARFSADYHSHLDSLSKPSEYSDLKWEYQRASSSSPLDYSFQFTPSRTAGTSGCSKESLAYSESEWGPSLDDYDRRPKSSYLNQTSPQPTMRQRSRSGSGLQEPMMPFGASAFKTHPQGHSYNSYTYPRLSEPTMCIPKVDYDPAQMVLSPPLSGSDTYPRGPAKLPQSQSKSGYSSSSHQYPSGYHKATLYHHPSLQSSSQYISTASYLSSLSLSSSIPAAQLGLLLRPAALQGVP

SEQ ID NO: 763 - DNA, 1439 bp, Homo sapiens
  CDS (35)..(1405)
tcatccacagccatcatataaaggttttggcatcatgtttgggaagaaaaagaaaaagattgaaatatctggcccgtccaactttgaacacagggttcatactgggtttgatccacaagagcagaagtttaccggccttccccagcagcggcacagcctgttagcagatacggccaacaggccaaagcctatggtggacccttcatgcatcacacccatccagctggctcctatgaaggtggattacgatcgagcacagatggtcctcagccctccactgtcagggtctgacacctaccccaggggccctgccaaactacctcaaagtcaaagcaaatcgggctattcctcaagcagtcaccagtacccgtctgggtaccacaaagccaccttgtaccatcacccctccctgcagagcagttcgcagtacatctccacggcttcctacctgagctccctcagcctctcatccagcacctacccgccgcccagctggggctcctcctccgaccagcagccctccagggtgtcccatgaacagtttcgggcggccctgcagctggtggtcagcccaggagaccccagggaatacttggccaactttatcaaaatcggggaaggctcaaccggcatcgtatgcatcgccaccgagaaacacacagggaaacaagttgcagtgaagaaaatggacctccggaagcaacagagacgagaactgcttttcaatgaggtcgtgatcatgcgggattaccaccatgacaatgtggttgacatgtacagcagctaccttgtcggcgatgagctctgggtggtcatggagtttctagaaggtggtgccttgacagacattgtgactcacaccagaatgaatgaagaacagatagctactgtctgcctgtcagttctgagagctctctcctaccttcataaccaaggagtgattcacagggacataaaaagtgactccattctcctgacaagcgatggccggataaagttgtctgattttggtttctgtgctcaagtttccaaagaggtgccgaagaggaaatcattggttggcactccctactggatggcccctgaggtgatttctaggctaccttatgggacagaggtggacatctggtccctcgggatcatggtgatagaaatgattgatggcgagcccccctacttcaatgagcctcccctccaggcgatgcggaggatccgggacagtttacctccaagagtgaaggacctacacaaggtttcttcagtgctccggggattcctagacttgatgttggtgagggagccctctcagagagcaacagcccaggaactcctcggacatccattcttaaaactagcaggtccaccgtcttgcatcgtccccctcatgagacaatacaggcatcactgagcagaggattcgtgtaggtggcaaagctaga

SEQ ID NO: 764 - protein, 457 aa, Homo sapiens
MFGKKKKKIEISGPSNFEHRVHTGFDPQEQKFTGLPQQRHSLLADTANRPKPMVDPSCITPIQLAPMKVDYDRAQMVLSPPLSGSDTYPRGPAKLPQSQSKSGYSSSSHQYPSGYHKATLYHHPSLQSSSQYISTASYLSSLSLSSSTYPPPSWGSSSDQQPSRVSHEQFRAALQLVVSPGDPREYLANFIKIGEGSTGIVCIATEKHTGKQVAVKKMDLRKQQRRELLFNEVVIMRDYHHDNVVDMYSSYLVGDELWVVMEFLEGGALTDIVTHTRMNEEQIATVCLSVLRALSYLHNQGVIHRDIKSDSILLTSDGRIKLSDFGFCAQVSKEVPKRKSLVGTPYWMAPEVISRLPYGTEVDIWSLGIMVIEMIDGEPPYFNEPPLQAMRRIRDSLPPRVKDLHKVSSVLRGFLDLMLVREPSQRATAQELLGHPFLKLAGPPSCIVPLMRQYRHH

SEQ ID NO: 765 - DNA, 1439 bp, Homo sapiens
  CDS (35)..(1405)
tcatccacagccatcatataaaggttttggcatcatgtttgggaagaaaaagaaaaagattgaaatatctggcccgtccaactttgaacacagggttcatactgggtttgatccacaagagcagaagtttaccggccttccccagcagtggcacagcctgttagcagatacggccaacaggccaaagcctatggtggacccttcatgcatcacacccatccggctggctcctatgaaggtggattacgatcgagcacagatggtcctcagccctccactgtcagggtctgacacctaccccaggggccctgccaaactacctcaaagtcaaagcaaatcgggctattcctcaagcagtcaccagtacccgtctgggtaccacaaagccaccttgtaccatcacccctccctgcagagcagttcgcagtacatctccacggcttcctacctgagctccctcagcctctcatccagcacctacccgccgcccagctggggctcctcctccgaccagcagccctccagggtgtcccatgaacagtttcgggcggccctgcagctggtggtcagcccaggagaccccagggaatacttggccaactttatcaaaatcggggaaggctcaaccggcatcgtatgcatcgccaccgagaaacacacagggaaacaagttgcagtgaagaaaatggacctccggaagcaacagagacgagaactgcttttcaatgaggtcgtgatcatgcgggattaccaccatgacaatgtggttgacatgtacagcagctaccttgtcggcgatgagctctgggtggtcatggagtttctagaaggtggtgccttgacagacattgtgactcacaccagaatgaatgaagaacagatagctactgtctgcctgtcagttctgagagctctctcctaccttcataaccaaggagtgattcacagggacataaaaagtgactccattctcctgacaagcgatggccggataaagttgtctgattttggtttctgtgctcaagtttccaaagaggtgccgaagaggaaatcattggttggcactccctactggatggcccctgaggtgatttctaggctaccttatgggacagaggtggacatctggtccctcgggatcatggtgatagaaatgattgatggcgagcccccctacttcaatgagcctcccctccaggcgatgcggaggatccgggacagtttacctccaagagtgaaggacctacacaaggtttcttcagtgctccggggattcctagacttgatgttggtgagggagccctctcagagagcaacagcccaggaactcctcggacatccattcttaaaactagcaggtccaccgtcttgcatcgtccccctcatgagacaatacaggcatcactgagcagaggattcgtgtaggtggcaaagctaga

SEQ ID NO: 766 - protein, 457 aa, Homo sapiens
MFGKKKKKIEISGPSNFEHRVHTGFDPQEQKFTGLPQQWHSLLADTANRPKPMVDPSCITPIRLAPMKVDYDRAQMVLSPPLSGSDTYPRGPAKLPQSQSKSGYSSSSHQYPSGYHKATLYHHPSLQSSSQYISTASYLSSLSLSSSTYPPPSWGSSSDQQPSRVSHEQFRAALQLVVSPGDPREYLANFIKIGEGSTGIVCIATEKHTGKQVAVKKMDLRKQQRRELLFNEVVIMRDYHHDNVVDMYSSYLVGDELWVVMEFLEGGALTDIVTHTRMNEEQIATVCLSVLRALSYLHNQGVIHRDIKSDSILLTSDGRIKLSDFGFCAQVSKEVPKRKSLVGTPYWMAPEVISRLPYGTEVDIWSLGIMVIEMIDGEPPYFNEPPLQAMRRIRDSLPPRVKDLHKVSSVLRGFLDLMLVREPSQRATAQELLGHPFLKLAGPPSCIVPLMRQYRHH

SEQ ID NO: 767 - DNA, 1439 bp, Homo sapiens
  CDS (35)..(1405)
tcatccacagccatcatataaaggttttggcatcatgtttgggaagaaaaagaaaaagattgaaatatctggcccgtccaactttgaacacagggttcatactgggtttgatccacaagagcagaagtttaccggccttccccagcagtggcacagcctgttagcagatacggccaacaggccaaagcctatggtggacccttcatgcatcacacccatccagctggctcctatgaaggtggattacgatcgagcacagatggtcctcagccctccactgtcagggtctgacacctaccccaggggccctgccaaactacctcaaagtcaaagcaaatcgggctattcctcaagcagtcaccagtacccgtctgggtaccacaaagccaccttgtaccatcacccctccctgcagagcagttcgcagtacatctccacggcttcctacctgagctccctcagcctctcatccagcacctacccgccgcccagctggggctcctcctccgaccagcagccctccagggtgtcccatgaacagtttcgggcggccctgcagctggtggtcagcccaggagaccccagggaatacttggccaactttatcaaaatcggggaaggctcaaccggcatcgtatgcatcgccaccgagaaacacacagggaaacaagttgcagtgaagaaaatggacctccggaagcaacagagacgagaactgcttttcaatgaggtcgtgatcatgcgggattaccaccatgacaatgtggttgacatgtacagcagctaccttgtcggcgatgagctctgggtggtcatggagtttctagaaggtggtgccttgacagacattgtgactcacaccagaatgaatgaagaacagatagctactgtctgcctgtcagttctgagagctctctcctaccttcataaccaaggagtgattcacagggacataaaaagtgactccatcctcctgacaagcgatggccggataaagttgtctgattttggtttctgtgctcaagtttccaaagaggtgccgaagaggaaatcattggttggcactccctactggatggcccctgaggtgatttctaggctaccttatgggacagaggtggacatctggtccctcgggatcatggtgatagaaatgattgatggcgagcccccctacttcaatgagcctcccctccaggcgatgcggaggatccgggacagtttacctccaagagtgaaggacctacacaaggtttcttcagtgctccggggattcctagacttgatgttggtgagggagccctctcagagagcaacagcccaggaactcctcggacatccattcttaaaactagcaggtccaccgtcttgcatcgtccccctcatgagacaatacaggcatcactgagcagaggattcgtgtaggtggcaaagctaga

SEQ ID NO: 768 - protein, 457 aa, Homo sapiens; identical to SEQ ID NO: 760

SEQ ID NO: 769 - DNA, 1439 bp, Homo sapiens
  CDS (35)..(1405)
tcatccacagccatcatataaaggttttggcatcatgtttgggaagaaaaagaaaaagattgaaatatctggcccgtccaactttgaacacagggttcatactgggtttgatccacaagagcagaagtttaccggccttccccagcagtggcacagcctgttagcagatacggccaacaggccaaagcctatggtggacccttcatgcatcacacccatccagctggctcctatgaaggtggattacgatcgagcacagatggtcctcagccctccactgtcagggtctgacacctaccccaggggccctgccaaactacctcaaagtcaaagcaaatcgggctattcctcaagcagtcaccagtacccgtctgggtaccacaaagccaccttgtaccatcacccctccctgcagagcagttcgcagtacatctccacggcttcctacctgagctccctcagcctctcatccagcacctacccgccgcccagctggggctcctcctccgaccagcagccctccagggtgtcccatgaacagtttcgggcggccctgcagctggtggtcagcccaggagaccccagggaatacttggccaactttatcaaaatcggggaaggctcaaccggcatcgtatgcatcgccaccgagaaacacacagggaaacaagttgcagtgaagaaaatggacctccggaagcaacagagacgagaactgcttttcaatgaggtcgtgatcatgcgggattaccaccatgacaatgtggttgacatgtacagcagctaccttgtcggcgatgagctctgggtggtcatggagtttctagaaggtggtgccttgacagacattgtgactcacaccagaatgaatgaagaacagatagctactgtctgcctgtcagttctgagagctctctcctaccttcataaccaaggagtgattcacagggacataaaaagtgactccattctcctgacaagcgatggccggataaagttgtctgattttggtttctgtgctcaagtttccaaagaggtgccgaagaggaaatcattggttggcactccctactggatggcccctgaggtgatttctaggctaccttatgggacagaggtggacatctggtccctcgggatcatggtgatagaaatgattgatggcgagcccccctacttcaatgagcctcccctccaggcgatgcggaggatccgggacagtttacctccaagagtgaaggacctacacaaggtttcttcagtgctccggggattcctagacttgatgttggtgagggagccctctcagagagcaacagcccaggaactcctcggacatccattcttaaaactagcaggtccaccgtcttgcattgtccccctcatgagacaatacaggcatcactgagcagaggattcgtgtaggtggcaaagctaga

SEQ ID NO: 770 - protein, 457 aa, Homo sapiens; identical to SEQ ID NO: 760

SEQ ID NO: 771 - DNA, 972 bp, Homo sapiens
  CDS (18)..(953)
ctcatatctccctcattatgtctgttctcaataactccgaagtcaagcttttccttctgattgggatcccaggactggaacatgcccacatttggttctccatccccatttgcctcatgtacctgcttgccatcatgggcaactgcaccattctctttattataaagacagagccctcgcttcatgagcccatgtattatttccttgccatgttggctgtctctgacatgggcctgtccctctcctcccttcctaccatgttgagggtcttcttgttcaatgccatgggaatttcacctaatgcctgctttgctcaagaattcttcattcatggattcactgtcatggaatcctcagtacttctaattatgtctttggaccgctttcttgccattcacaatcccttaagatacagttctatcctcactagcaacagggttgctaaaatgggacttattttagccattaggagcattctcttagtgattccatttcccttcaccttaaggagattaaaatattgtcaaaagaatcttctttctcactcatactgtcttcatcaggataccatgaagctggcctgctctgacaacaagaccaatgtcatctatggcttcttcattgctctctgtactatgctggacttggcactgattgttttgtcttatgtgctgatcttgaagactatactcagcattgcatctttggcagagaggcttaaggccctaaatacctgtgtctcccacatctgtgctgtgctcaccttctatgtgcccatcatcaccctggctgccatgcatcactttgccaagcacaaaagccctcttgttgtgatccttattgcagatatgttcttgttggtgccgccccttatgaaccccattgtgtactgtgtaaagactcgacaaatctgggagaagatcttggggaagttgcttaatgtatgtgggagataagaacttgaacaattag

SEQ ID NO: 772 - protein, 312 aa, Homo sapiens
MSVLNNSEVKLFLLIGIPGLEHAHIWFSIPICLMYLLAIMGNCTILFIIKTEPSLHEPMYYFLAMLAVSDMGLSLSSLPTMLRVFLFNAMGISPNACFAQEFFIHGFTVMESSVLLIMSLDRFLAIHNPLRYSSILTSNRVAKMGLILAIRSILLVIPFPFTLRRLKYCQKNLLSHSYCLHQDTMKLACSDNKTNVIYGFFIALCTMLDLALIVLSYVLILKTILSIASLAERLKALNTCVSHICAVLTFYVPIITLAAMHHFAKHKSPLVVILIADMFLLVPPLMNPIVYCVKTRQIWEKILGKLLNVCGR

SEQ ID NO: 773 - DNA, 972 bp, Homo sapiens; identical to SEQ ID NO: 771
  CDS (18)..(953)

SEQ ID NO: 774 - protein, 312 aa, Homo sapiens; identical to SEQ ID NO: 772

SEQ ID NO: 775 - DNA, 1630 bp, Homo sapiens
  CDS (1)..(1527)
atggggtcccgccacttcgaggggatttatgaccacgtggggcacttcggcagattccagagagtcctctatttcatatgtgccttccagaacatctcttgtggtattcactacttggcttctgtgttcatgggagtcacccctcatcatgtctgcaggcccccaggcaatgtgagtcaggttgttttccataatcactctaattggagtttggaggacaccggggccctgttgtcttcaggccagaaagattatgttacggtgcagttgcagaatggtgagatctgggagctctcaaggtgtagcaggaataagagggagaacacatcgagtttgggctatgaatacactggcagtaagaaagagtttccttgtgtggatggctacatatatgaccagaacacatggaaaagcactgcggtgacccagtggaacctggtctgtgaccgaaaatggcttgcaatgctgatccagcccctatttatgtttggagtcctactgggatcggtgacttttggctacttttctgacaggctaggacgccgggtggtcttgtgggccacaagcagtagcatgtttttgtttggaatagcagcggcgtttgcagttgattattacaccttcatggctgctcgcttttttcttgccatggttgcaagtggctatcttgtggtggggtttgtctatgtgatggaattcattggcatgaagtctcggacatgggcgtctgtccatttgcattccttttttgcagttggaaccctgctggtggctttgacaggatacttggtcaggacctggtggctttaccagatgatcctctccacagtgactgtcccctttatcctgtgctgttgggtgctcccagagacacctttttggcttctctcagagggacgatatgaagaagcacaaaaaatagttgacatcatggccaagtggaacagggcaagctcctgtaaactgtcagaacttttatcactggacctacaaggtcctgttagtaatagccccactgaagttcagaagcacaacctatcatatctgttttataactggagcattacgaaaaggacacttaccgtttggctaatctggttcactggaagtttgggattctactcgttttccttgaattctgttaacttaggaggcaatgaatacttaaacctcttcctcctgggtgtagtggaaattcccgcctacaccttcgtgtgcatcgccacggacaaggtcgggaggagaacagtcctggcctactctcttttctgcagtgcactggcctgtggtgtcgttatggtgatcccccagatcgctggctgtgggaagcggcagcatggtgtgtcgcctggccagcatcctggcgccgttctctgtggacctcagcagcatttggatcttcataccacagttgtttgttgggactatggccctcctgagtggagtgttaacactaaagcttccagaaacccttgggaaacggctagcaactacttgggaggaggctgcaaaactggagtcagagaatgaaagcaagtcaagcaaattacttctcacaactaataatagtgggctggaaaaaacggaagcgattacccccagggattctggtcttggtgaataaatgtgc

SEQ ID NO: 776 - protein, 509 aa, Homo sapiens
MGSRHFEGIYDHVGHFGRFQRVLYFICAFQNISCGIHYLASVFMGVTPHHVCRPPGNVSQVVFHNHSNWSLEDTGALLSSGQKDYVTVQLQNGEIWELSRCSRNKRENTSSLGYEYTGSKKEFPCVDGYIYDQNTWKSTAVTQWNLVCDRKWLAMLIQPLFMFGVLLGSVTFGYFSDRLGRRVVLWATSSSMFLFGIAAAFAVDYYTFMAARFFLAMVASGYLVVGFVYVMEFIGMKSRTWASVHLHSFFAVGTLLVALTGYLVRTWWLYQMILSTVTVPFILCCWVLPETPFWLLSEGRYEEAQKIVDIMAKWNRASSCKLSELLSLDLQGPVSNSPTEVQKHNLSYLFYNWSITKRTLTVWLIWFTGSLGFYSFSLNSVNLGGNEYLNLFLLGVVEIPAYTFVCIATDKVGRRTVLAYSLFCSALACGVVMVIPQIAGCGKRQHGVSPGQHPGAVLCGPQQHLDLHTTVVCWDYGPPEWSVNTKASRNPWETASNYLGGGCKTGVRE

SEQ ID NO: 777 - DNA, 1599 bp, Homo sapiens
  CDS (1)..(1545)
atggggtcccgccacttcgaggggatttatgaccacgtggggcacttcggcagattccagagagtcctctatttcatatgtgccttccagaacatctcttgtggtattcactacttggcttctgtgttcatgggagtcacccctcatcatgtctgcaggcccccaggcaatgtgagtcaggttgttttccataatcactctaattggagtttggaggacaccggggccctgttgtcttcaggccagaaagattatgttacggtgcagttgcagaatggtgagatctgggagctctcaaggtgtagcaggaataagagggagaacacatcgagtttgggctatgaatacactggcagtaagaaagagtttccttgtgtggatggctacatatatgaccagaacacatggaaaagcactgcggtgacccagtggaacctggtctgtgaccgaaaatggcttgcaatgctgatccagcccctatttatgtttggagtcctactgggatcggtgacttttggctacttttctgacaggctaggacgccgggtggtcttgtgggccacaagcagtagcatgtttttgtttggaatagcagcggcgtttgcagttgattattacaccttcatggctgctcgcttttttcttgccatggttgcaagtggctatcttgtggtggggtttgtctatgtgatggaattcattggcatgaagtctcggacatgggcgtctgtccatttgcattccttttttgcagttggaaccctgctggtggctttgacaggatacttggtcaggacctggtggctttaccagatgatcctctccacagtgactgtcccctttatcctgtgctgttgggtgctcccagagacacctttttggcttctctcagagggacgatatgaagaagcacaaaaaatagttgacatcatggccaagtggaacagggcaagctcctgtaaactgtcagaacttttatcactggacctacaaggtcctgttagtaatagccccactgaagttcagaagcacaacctatcatatctgttttataactggagcattacgaaaaggacacttaccgtttggctaatctggttcactggaagtttgggattctactcgttttccttgaattctgttaacttaggaggcaatgaatacttaaacctcttcctcctgggtgtagtggaaattcccgcctacaccttcgtgtgcatcgccacggacaaggtcgggaggagaacagtcctggcctactctcttttctgcagtgcactggcctgtggtgtcgttatggtgatcccccagaaacattatattttgggtgtggtgacagctatggttggaaaatttgccatcggggcagcatttggtctcatttatctttatacagctgagctgtatccaaccattgtaagatcgctggctgtgggaagcggcagcatggtgtgtcgcctggccagcatcctggcgccgttctctgtggacctcagcagcatttggatcttcataccacagctcctaggacagcaccttcaggagtaataatgcaggcagtcgctggcaattaaggaggcgctccatggtgggtcatga

SEQ ID NO: 778 - protein, 515 aa, Homo sapiens
MGSRHFEGIYDHVGHFGRFQRVLYFICAFQNISCGIHYLASVFMGVTPHHVCRPPGNVSQVVFHNHSNWSLEDTGALLSSGQKDYVTVQLQNGEIWELSRCSRNKRENTSSLGYEYTGSKKEFPCVDGYIYDQNTWKSTAVTQWNLVCDRKWLAMLIQPLFMFGVLLGSVTFGYFSDRLGRRVVLWATSSSMFLFGIAAAFAVDYYTFMAARFFLAMVASGYLVVGFVYVMEFIGMKSRTWASVHLHSFFAVGTLLVALTGYLVRTWWLYQMILSTVTVPFILCCWVLPETPFWLLSEGRYEEAQKIVDIMAKWNRASSCKLSELLSLDLQGPVSNSPTEVQKHNLSYLFYNWSITKRTLTVWLIWFTGSLGFYSFSLNSVNLGGNEYLNLFLLGVVEIPAYTFVCIATDKVGRRTVLAYSLFCSALACGVVMVIPQKHYILGVVTAMVGKFAIGAAFGLIYLYTAELYPTIVRSLAVGSGSMVCRLASILAPFSVDLSSIWIFIPQLLGQHLQE

SEQ ID NO: 779 - DNA, 2069 bp, Homo sapiens
  CDS (279)..(1880)
gcttctaggccttctcagtagatggagctaagtaatatatgtatatatactaacccacagatataaatatgtctataattatttctatatttatccattcgtgtatatgttaagataaacatgatggagacccttcaaatttgcttatgttctttttcagcctatagaccagatataataattagcttttcttctcttgcagattccagagagtcctctatttcatatgtgccttccagaacatctcttgtggtattcactacttggcttctgtgttcatgggagtcacccctcatcatgtctgcaggcccccaggcaatgtgagtcaggttgttttccataatcactctaattggagtttggaggacaccggggccctgttgtcttcaggccagaaagattatgttacggtgcagttgcagaatggtgagatctgggagctctcaaggtgtagcaggaataagagggagaacacatcgagtttgggctatgaatacactggcagtaagaaagagtttccttgtgtggatggctacatatatgaccagaacacatggaaaagcactgcggtgacccagtggaacctggtctgtgaccgaaaatggcttgcaatgctgatccagcccctatttatgtttggagtcctactgggatcggtgacttttggctacttttctgacaggctaggacgccgggtggtcttgtgggccacaagcagtagcatgtttttgtttggaatagcagcggcgtttgcagttgattattacaccttcatggctgctcgcttttttcttgccatggttgcaagtggctatcttgtggtggggtttgtctatgtgatggaattcattggcatgaagtctcggacatgggcgtctgtccatttgcattccttttttgcagttggaaccctgctggtggctttgacaggatacttggtcaggacctggtggctttaccagatgatcctctccacagtgactgtcccctttatcctgtgctgttgggtgctcccagagacacctttttggcttctctcagagggacgatatgaagaagcacaaaaaatagttgacatcatggccaagtggaacagggcaagctcctgtaaactgtcagaacttttatcactggacctacaaggtcctgttagtaatagccccactgaagttcagaagcacaacctatcatatctgttttataactggagcattacgaaaaggacacttaccgtttggctaatctggttcactggaagtttgggattctactcgttttccttgaattctgttaacttaggaggcaatgaatacttaaacctcttcctcctgggtgtagtggaaattcccgcctacaccttcgtgtgcatcgccatggacaaggtcgggaggagaacagtcctggcctactctcttttctgcagtgcactggcctgtggtgtcgttatggtgatcccccagaaacattatattttgggtgtggtgacagctatggttggaaaatttgccatcggggcagcatttggcctcatttatctttatacagctgagctgtatccaaccattgtaagatcgctggctgtgggaagcggcagcatggtgtgtcgcctggccagcatcctggcgccgttctctgtggacctcagcagcatttggatcttcataccacagttgtttgttgggactatggccctcctgagtggagtgttaacactaaagcttccagaaacccttgggaaacggctagcaactacttgggaggaggctgcaaaactggagtcagagaatgaaagcaagtcaagcaaattacttctcacaactaataatagtgggctggaaaaaacggaagcgattacccccagggattctggtcttggtgaataaatgtgccatgcctgctgtctagcacctgaaatattatttaccctaatgcctttgtattagaggaatcttattctcatctcccatatgttgtttgtatgtctttttaataaattttgtaagaaaattttaaagcaaatatgttataaaagaaataaaaactaagatgaaaattctcagttttaaaaa

SEQ ID NO: 780 - protein, 534 aa, Homo sapiens
MGVTPHHVCRPPGNVSQVVFHNHSNWSLEDTGALLSSGQKDYVTVQLQNGEIWELSRCSRNKRENTSSLGYEYTGSKKEFPCVDGYIYDQNTWKSTAVTQWNLVCDRKWLAMLIQPLFMFGVLLGSVTFGYFSDRLGRRVVLWATSSSMFLFGIAAAFAVDYYTFMAARFFLAMVASGYLVVGFVYVMEFIGMKSRTWASVHLHSFFAVGTLLVALTGYLVRTWWLYQMILSTVTVPFILCCWVLPETPFWLLSEGRYEEAQKIVDIMAKWNRASSCKLSELLSLDLQGPVSNSPTEVQKHNLSYLFYNWSITKRTLTVWLIWFTGSLGFYSFSLNSVNLGGNEYLNLFLLGVVEIPAYTFVCIAMDKVGRRTVLAYSLFCSALACGVVMVIPQKHYILGVVTAMVGKFAIGAAFGLIYLYTAELYPTIVRSLAVGSGSMVCRLASILAPFSVDLSSIWIFIPQLFVGTMALLSGVLTLKLPETLGKRLATTWEEAAKLESENESKSSKLLLTTNNSGLEKTEAITPRDSGLGE

SEQ ID NO: 781 - DNA, 1666 bp, Homo sapiens
  CDS (76)..(1653)
ttccagagagtcctctatttcatatgtgccttccagaacatctcttgtggtattcactacttggcttctgtgttcatgggagtcacccctcatcatgtctgcaggcccccaggcaatgtgagtcaggttgttttccataatcactctaattggagtttggaggacaccggggccctgttgtcttcaggccagaaagattatgttacggtgcagttgcagaatggtgagatctgggagctctcaaggtgtagcaggaataagagggagaacacatcgagtttgggctatgaatacactggcagtaagaaagagtttccttgtgtggatggctacatatatgaccagaacacatggaaaagcactgcggtgacccagtggaacctggtctgtgaccgaaaatggcttgcaatgctgatccagcccctatttatgtttggagtcctactgggatcggtgacttttggctacttttctgacaggcttttttgcctatatgtgatttgcaatggggtcagactcctcaatagttataaatgtgaccttgaatataaatccctattatttgtttttcaggttgcaagtggctatcttgtggtggggtttgtctatgtgatggaattcattggcatgaagtctcggacatgggcgtctgtccatttgcattccttttttgcagttggaaccctgctggtggctttgacaggatacttggtcaggacctggtggctttaccagatgatcctctccacagtgactgtcccctttatcctgtgctgttgggtgctcccagagacacctttttggcttctctcagagggacgatatgaagaagcacaaaaaatagttgacatcatggccaagtggaacagggcaagctcctgtaaactgtcagaacttttatcactggacctacaaggtcctgttagtaatagccccactgaagttcagaagcacaacctatcatatctgttttataactggagcattacgaaaaggacacttaccgtttggctaatctggttcactggaagtttgggattctactcgttttccttgaattctgttaacttaggaggcaatgaatacttaaacctcttcctcacaggtgtagtggaaattcccgcctacaccttcgtgtgcatcgccatggacaaggtcgggaggagaacagtcctggcctactctcttttctgcagtgcactggcctgtggtgtcgttatggtgatcccccaggtgagttatcttctgggtgtggtgacagctatggttggaaaatttgccatcggggcagcatttggcctcatttatctttatacagctgagctgtatccaaccattgtaaggtcgctggctgtgggaagcggcagcatggtgtgtcgcctggccagcatcctggcgccgttctctgtggacctcagcagcatttggatcttcataccacagttgtttgttgggactatggccctcctgagtggagtgttaacactaaagcttccagaaacccttgggaaacggctagcaactacttgggaggaggctgcaaaactggagtcagagaatgaaagcaagtcaagcaaattacttctcacaactaataatagtgggctggaaaaaacggaagcgattacccccagggattctggtcttggtgaataaatgtgccatg

SEQ ID NO: 782 - protein, 526 aa, Homo sapiens
MGVTPHHVCRPPGNVSQVVFHNHSNWSLEDTGALLSSGQKDYVTVQLQNGEIWELSRCSRNKRENTSSLGYEYTGSKKEFPCVDGYIYDQNTWKSTAVTQWNLVCDRKWLAMLIQPLFMFGVLLGSVTFGYFSDRLFCLYVICNGVRLLNSYKCDLEYKSLLFVFQVASGYLVVGFVYVMEFIGMKSRTWASVHLHSFFAVGTLLVALTGYLVRTWWLYQMILSTVTVPFILCCWVLPETPFWLLSEGRYEEAQKIVDIMAKWNRASSCKLSELLSLDLQGPVSNSPTEVQKHNLSYLFYNWSITKRTLTVWLIWFTGSLGFYSFSLNSVNLGGNEYLNLFLTGVVEIPAYTFVCIAMDKVGRRTVLAYSLFCSALACGVVMVIPQVSYLLGVVTAMVGKFAIGAAFGLIYLYTAELYPTIVRSLAVGSGSMVCRLASILAPFSVDLSSIWIFIPQLFVGTMALLSGVLTLKLPETLGKRLATTWEEAAKLESENESKSSKLLLTTNNSGLEKTEAITPRDSGLGE

SEQ ID NO: 783 - DNA, 3092 bp, Homo sapiens
  CDS (1)..(3072)
atggagccctccagagcgcttctcggctgcctagcgagcgccgccgctgccgccccgccgggggaggatggagcaggggccggggccgaggaggaggaggaggaggaggaggaggcggcggcggcggtgggccccggggagctgggctgcgacgcgccgctgccctactggacggccgtgttcgagtacgaggcggcgggcgaggacgagctgaccctgcggctgggcgacgtggtggaggtgctgtccaaggactcgcaggtgtccggcgacgagggctggtggaccgggcagctgaaccagcgggtgggcatcttccccagcaactacgtgaccccgcgcagcgccttctccagccgctgccagcccggcggcgaaattgattttgcggagctcaccttggaagagattattggcatcgggggctttgggaaggtctatcgtgctttctggataggggatgaggttgctgtgaaagcagctcgccacgaccctgatgaggacatcagccagaccatagagaatgttcgccaagaggccaagctcttcgccatgctgaagcaccccaacatcattgccctaagaggggtatgtctgaaggagcccaacctctgcttggtcatggagtttgctcgtggaggacctttgaatagagtgttatctgggaaaaggattcccccagacatcctggtgaattgggctgtgcagattgccagagggatgaactacttacatgatgaggcaattgttcccatcatccaccgcgaccttaagtccagcaacgtattgatcctccagaaggtggagaatggagacctgagcaacaagattctgaagatcactgattttggcctggctcgggaatggcaccgaaccaccaagatgagtgcggcagggacgtatgcttggatggcacccgaagtcatccgggcctccatgttttccaaaggcagtgatgtgtggagctatggggtgctactttgggagttgctgactggtgaggtgccctttcgaggcattgatggcttagcagtcgcttatggagtggccatgaacaaactcgcccttcctattccttctacgtgcccagaaccttttgccaaactcatggaagactgctggaatcctgatccccactcacgaccatctttcacgaatatcctggaccagctaaccaccatagaggagtctggtttctttgaaatgcccaaggactccttccactgcctgcaggacaactggaaacacgagattcaggagatgtttgaccaactcagggccaaagaaaaggaacttcgcacctgggaggaggagctgacgcgggctgcactgcagcagaagaaccaggaggaactgctgcggcgtcgggagcaggagctggccgagcgggagattgacatcctggaacgggagctcaacatcatcatccaccagctgtgccaggagaagccccgggtgaagaaacgcaagggcaagttcaggaagagccggctgaagctcaaggatggcaaccgcatcagcctcccttctggtttccagcacaagttcacggtgcaggcctcccctaccatggataaaaggaagagtcttatcaacagccgctccagtcctcctgcaagccccaccatcattcctcgccttcgagccatccagtgtgagactgtttcccaaattagctggggccagaacacacaggggcacctgtccgaaagcagcaaaacctggggcaggagctcagtcgtcccaaaggaggaaggggaggaggaggagaagagggccccaaagaagaagggacggacgtgggggccagggacgcttggtcagaaggagcttgcctcgggagatgaactcaagtccctggtagatggatataagcagtggtcgtccagtgcccccaacctggtgaagggcccaaggagtaccccggccctgccagggttcaccagccttatggagatggaggatgaggacagtgaaggcccagggagtggagagagtcgcctacagcattcacccagccagtcctacctctgtatcccattccctcgtggagagcccaccccagtcaactcggccacgagtacccctcagctgacgccaaccaacagcctcaagcggggcggtgcccaccaccgccgctgcgaggtggctctgctcggctgtggggctgttctggcagccacaggcctagggtttgacttgctggaagctggcaagtgccagctgcttcccctggaggagcctgagccaccagcccgggaggagaagaaaagacgggagggtctttttcagaggtccagccgtcctcgtcggagcaccagccccccatcccgaaagcttttcaagaaggaggagcccatgctgttgctaggagacccctctgcctccctgacgctgctctccctctcctccatctccgagtgcaactccacacgctccctgctgcagtccgacagcgatgaaattgtcgtgtatgagatgccagtcagcccagtcgaggcccctcccctgagtccatgtacccacaaccccctggtcaatgtccgagtagagcgcttcaaacgagatcctaaccaatctctgactcccacccatgtcaccctcaccaccccctcgcagcccagcagtcaccggcggactccttctgatggggcccttaagccagagactctcctagccagcaggagccccagtcccagccgagacccaggtgaattcccccgtctccctgaccccaatgtggtcttccccccaaccccaaggcgctggaacactcagcaggactctaccttggagagacccaagactctggagtttctgcctcggccgcgtccttctgccaaccggcaacggctggacccttggtggtttgtgtcccccagccatgcccgcagcacctccccagccaacagctccagcacagagacgcccgggccgctgcccccgactgagcggacgctcctggacctggatgcagaggggcagagtcaggacagcaccgtgccgctgtgcagagcggaactgaacacacacaggcctgccccttatgagatccagcaggagttctggtcttagcacgaaaaggattgggg

SEQ ID NO: 784 - protein, 1024 aa, Homo sapiens
MEPSRALLGCLASAAAAAPPGEDGAGAGAEEEEEEEEEAAAAVGPGELGCDAPLPYWTAVFEYEAAGEDELTLRLGDVVEVLSKDSQVSGDEGWWTGQLNQRVGIFPSNYVTPRSAFSSRCQPGGEIDFAELTLEEIIGIGGFGKVYRAFWIGDEVAVKAARHDPDEDISQTIENVRQEAKLFAMLKHPNIIALRGVCLKEPNLCLVMEFARGGPLNRVLSGKRIPPDILVNWAVQIARGMNYLHDEAIVPIIHRDLKSSNVLILQKVENGDLSNKILKITDFGLAREWHRTTKMSAAGTYAWMAPEVIRASMFSKGSDVWSYGVLLWELLTGEVPFRGIDGLAVAYGVAMNKLALPIPSTCPEPFAKLMEDCWNPDPHSRPSFTNILDQLTTIEESGFFEMPKDSFHCLQDNWKHEIQEMFDQLRAKEKELRTWEEELTRAALQQKNQEELLRRREQELAEREIDILERELNIIIHQLCQEKPRVKKRKGKFRKSRLKLKDGNRISLPSGFQHKFTVQASPTMDKRKSLINSRSSPPASPTIIPRLRAIQCETVSQISWGQNTQGHLSESSKTWGRSSVVPKEEGEEEEKRAPKKKGRTWGPGTLGQKELASGDELKSLVDGYKQWSSSAPNLVKGPRSTPALPGFTSLMEMEDEDSEGPGSGESRLQHSPSQSYLCIPFPRGEPTPVNSATSTPQLTPTNSLKRGGAHHRRCEVALLGCGAVLAATGLGFDLLEAGKCQLLPLEEPEPPAREEKKRREGLFQRSSRPRRSTSPPSRKLFKKEEPMLLLGDPSASLTLLSLSSISECNSTRSLLQSDSDEIVVYEMPVSPVEAPPLSPCTHNPLVNVRVERFKRDPNQSLTPTHVTLTTPSQPSSHRRTPSDGALKPETLLASRSPSPSRDPGEFPRLPDPNVVFPPTPRRWNTQQDSTLERPKTLEFLPRPRPSANRQRLDPWWFVSPSHARSTSPANSSSTETPGPLPPTERTLLDLDAEGQSQDSTVPLCRAELNTHRPAPYEIQQEFWS

SEQ ID NO: 785 - DNA, 807 bp, Homo sapiens
  CDS (1)..(807)
accggatccctcaccttggaagagattattggcatcgggggctttgggaaggtctatcgtgctttctggataggggatgaggttgctgtgaaagcagctcgccacgaccctgatgaggacatcagccagaccatagagaatgttcgccaagaggccaagctcttcgccatgctgaagcaccccaacatcattgccctaagaggggtatgtctgaaggagcccaacctctgcttggtcatggagtttgctcgtggaggacctttgaatagagtgttatctgggaaaaggattcccccagacatcctggtgaattgggctgtgcagattgccagagggatgaactacttacatgatgaggcaattgttcccatcatccaccgcgaccttaagtccagcaacatattgatcctccagaaggtggagaatggagacctgagcaacaagattctgaagatcactgattttggcctggctcgggaatggcaccgaaccaccaagatgagtgcggcagggacgtatgcttggatggcacccgaagtcatccgggcctccatgttttccaaaggcagtgatgtgtggagctatggggtgctactttgggagttgctgactggtgaggtgccctttcgaggcattgatggcttagcagtcgcttatggagtggccatgaacaaactcgcccttcctattccttctacgtgcccagaaccttttgccaaactcatggaagactgctggaatcctgatccccactcacgaccatctttcacgaatatcctggaccagctaaccaccatactcgagggc

SEQ ID NO: 786 - protein, 269 aa, Homo sapiens
TGSLTLEEIIGIGGFGKVYRAFWIGDEVAVKAARHDPDEDISQTIENVRQEAKLFAMLKHPNIIALRGVCLKEPNLCLVMEFARGGPLNRVLSGKRIPPDILVNWAVQIARGMNYLHDEAIVPIIHRDLKSSNILILQKVENGDLSNKILKITDFGLAREWHRTTKMSAAGTYAWMAPEVIRASMFSKGSDVWSYGVLLWELLTGEVPFRGIDGLAVAYGVAMNKLALPIPSTCPEPFAKLMEDCWNPDPHSRPSFTNILDQLTTILEG

SEQ ID NO: 787 - DNA, 3092 bp, Homo sapiens
  CDS (1)..(3072)
atggagccctccagagcgcttctcggctgcctagcgagcgccgccgctgccgccccgccgggggaggatggagcaggggccggggccgaggaggaggaggaggaggaggaggaggcggcggcggcggtgggccccggggagctgggctgcgacgcgccgctgccctactggacggccgtgttcgagtacgaggcggcgggcgaggacgagctgaccctgcggctgggcgacgtggtggaggtgctgtccaaggactcgcaggtgtccggcgacgagggctggtggaccgggcagctgaaccagcgggtgggcatcttccccagcaactacgtgaccccgcgcagcgccttctccagccgctgccagcccggcggcgaaattgattttgcggagctcaccttggaagagattattggcatcgggggctttgggaaggtctatcgtgctttctggataggggatgaggttgctgtgaaagcagctcgccacgaccctgatgaggacatcagccagaccatagagaatgttcgccaagaggccaagctcttcgccatgctgaagcaccccaacatcattgccctaagaggggtatgtctgaaggagcccaacctctgcttggtcatggagtttgctcgtggaggacctttgaatagagtgttatctgggaaaaggattcccccagacatcctggtgaattgggctgtgcagattgccagagggatgaactacttacatgatgaggcaattgttcccatcatccaccgcgaccttaagtccagcaacgtattgatcctccagaaggtggagaatggagacctgagcaacaagattctgaagatcactgattttggcctggctcgggaatggcaccgaaccaccaagatgagtgcggcagggacgtatgcttggatggcacccgaagtcatccgggcctccatgttttccaaaggcagtgatgtgtggagctatggggtgctactttgggagttgctgactggtgaggtgccctttcgaggcattgatggcttagcagtcgcttatggagtggccatgaacaaactcgcccttcctattccttctacgtgcccagaaccttttgccaaactcatggaagactgctggaatcctgatccccactcacgaccatctttcacgaatatcctggaccagctaaccaccatagaggagtctggtttctttgaaatgcccaaggactccttccactgcctgcaggacaactggaaacacgagattcaggagatgtttgaccaactcagggccaaagaaaaggaacttcgcacctgggaggaggagctgacgcgggctgcactgcagcagaagaaccaggaggaactgctgcggcgtcgggagcaggagctggccgagcgggagattgacatcctggaacgggagctcaacatcatcatccaccagctgtgccaggagaagccccgggtgaagaaacgcaagggcaagttcaggaagagccggctgaagctcaaggatggcaaccgcatcagcctcccttctggtttccagcacaagttcacggtgcaggcctcccctaccatggataaaaggaagagtcttatcaacagccgctccagtcctcctgcaagccccaccatcattcctcgccttcgagccatccagtgtgagactgtttcccaaattagctggggccagaacacacaggggcacctgtccgaaagcagcaaaacctggggcaggagctcagtcgtcccaaaggaggaaggggaggaggaggagaagagggccccaaagaagaagggacggacgtgggggccagggacgcttggtcagaaggagcttgcctcgggagatgaactcaagtccctggtagatggatataagcagtggtcgtccagtgcccccaacctggtgaagggcccaaggagtaccccggccctgccagggttcaccagccttatggagatggaggatgaggacagtgaaggcccagggagtggagagagtcgcctacagcattcacccagccagtcctacctctgtatcccattccctcgtggagagcccaccccagtcaactcggccacgagtacccctcagctgacgccaaccaacagcctcaagcggggcggtgcccaccaccgccgctgcgaggtggctctgctcggctgtggggctgttctggcagccacaggcctagggtttgacttgctggaagctggcaagtgccagctgcttcccctggaggagcctgagccaccagcccgggaggagaagaaaagacgggagggtctttttcagaggtccagccgtcctcgtcggagcaccagccccccatcccgaaagcttttcaagaaggaggagcccatgctgttgctaggagacccctctgcctccctgacgctgctctccctctcctccatctccgagtgcaactccacacgctccctgctgcagtccgacagcgatgaaattgtcgtgtatgagatgccagtcagcccagtcgaggcccctcccctgagtccatgtacccacaaccccctggtcaatgtccgagtagagcgcttcaaacgagatcctaaccaatctctgactcccacccatgtcaccctcaccaccccctcgcagcccagcagtcaccggcggactccttctgatggggcccttaagccagagactctcctagccagcaggagccccagtcccagccgagacccaggcgaattcccccgtctccctgaccccaatgtggtcttccccccaaccccaaggcgctggaacactcagcaggactctaccttggagagacccaagactctggagtttctgcctcggccgcgtccttctgccaaccggcaacggctggacccttggtggtttgtgtcccccagccatgcccgcagcacctccccagccaacagctccagcacagagacgcccgggccgctgcccccgactgagcggacgctcctggacctggatgcagaggggcagagtcaggacagcaccgtgccgctgtgcagagcggaactgaacacacacaggcctgccccttatgagatccagcaggagttctggtcttagcacgaaaaggattgggg

SEQ ID NO: 788 - protein, 1024 aa, Homo sapiens; identical to SEQ ID NO: 784

SEQ ID NO: 789 - DNA, 866 bp, Homo sapiens
  CDS (19)..(819)
cccagccttgaagacagaatgagaggggtttcctgtctccaggtcctgctccttctggtgctggcctgcgggcagccccgcatgtccagtcggatcgttgggggccgggatggccgggacggagagtggccgtggcaggcgagcatccagcatcgtggggcacacgtgtgcggggggtcgctcatcgccccccagtgggtgctgacagcggcgcactgcttccccagggcactgccagctgagtaccgcgtgcgcctgggggcgctgcgtctgggctccacctcgccccgcacgctctcggtgcccgtgcgacgggtgctgctgcccccggactactccgaggacggggcccgcggcgacctggcactgctgcagctgcgtcgcccggtgcccctgagcgctcgcgtccaacccgtctgcctgcccgtgcccggcgcccgcccgccgcccggcacaccatgccgggtcaccggctggggcagcctccgcccaggagtgcccctcccagagtggcgaccgctacaaggagtaagggtgccgctgctggactcgcgcacctgcgacggcctctaccacgtgggcgcggacgtgccccaggctgagcgcattgtgctgcctgggagtctgtgtgccggctacccccagggccacaaggacgcctgccaggtgtgcacccagcctccccagcctccggagtcccctccctgtgcccagcaccctccctccctgaactccaggacccaggacatcccaactcaggctcaggatcctggcctccaacctagaggcaccacgccaggggtctggaaccctgagaactgaagtcctgggagggctgggacttaggctcctctttctcctgcagg

SEQ ID NO: 790 - protein, 267 aa, Homo sapiens
MRGVSCLQVLLLLVLACGQPRMSSRIVGGRDGRDGEWPWQASIQHRGAHVCGGSLIAPQWVLTAAHCFPRALPAEYRVRLGALRLGSTSPRTLSVPVRRVLLPPDYSEDGARGDLALLQLRRPVPLSARVQPVCLPVPGARPPPGTPCRVTGWGSLRPGVPLPEWRPLQGVRVPLLDSRTCDGLYHVGADVPQAERIVLPGSLCAGYPQGHKDACQVCTQPPQPPESPPCAQHPPSLNSRTQDIPTQAQDPGLQPRGTTPGVWNPEN

SEQ ID NO: 791 - DNA, 638 bp, Homo sapiens
  CDS (14)..(577)
ccttgaagacagaatgagaggggtttcctgtctccaggtcctgctccttctggtgctgggagctgctgggactcagggaaggaagtctgcagcctgcgggcagccccgcatgtccagtcggatcgttgggggccgggatggccgggacggagagtggccgtggcaggcgagcatccagcatcgtggggcacacgtgtgcggggggtcgctcatcgccccccagtgggtgctgacagcggcgcactgcttccccagtgcccctccagagtggcgaccgctacaaggagtaagggtgccgctgctggactcgcgcacctgcgacggcctctaccacgtgggcgcggacgtgccccaggctgagcgcattgtgctgcctgggagtctgtgtgccggctacccccagggccacaaggacgcctgccaggtgtgcacccagcctccccagcctccggagtcccctccctgtgcccagcaccctccctccctgaactccaggacccaggacatcccaactcaggctcaggatcctggcctccaacctagaggcaccacgccaggggtctggaaccctgagaactgaagtcctgggagggctgggacttaggctcctctttctcctggagggtgattctggggga

SEQ ID NO: 792 - protein, 188 aa, Homo sapiens
MRGVSCLQVLLLLVLGAAGTQGRKSAACGQPRMSSRIVGGRDGRDGEWPWQASIQHRGAHVCGGSLIAPQWVLTAAHCFPSAPPEWRPLQGVRVPLLDSRTCDGLYHVGADVPQAERIVLPGSLCAGYPQGHKDACQVCTQPPQPPESPPCAQHPPSLNSRTQDIPTQAQDPGLQPRGTTPGVWNPEN

SEQ ID NO: 793 - DNA, 1165 bp, Homo sapiens
  CDS (606)..(947)
caccaagctttgggactacgagacgcccaaggtgatcgtggtgaggaaccggcgcctgggggtcctgtaccgcgccgtgcagctgctcatcctgctctacttcgtgtggtacgtattcatcgtgcagaaaagctaccaggagagcgagacgggccccgagagctccatcatcaccaaggtcaaggggatcaccacgtccgagcacaaagtgtgggacgtggaggagtacgtgaagccccccgaggggggcagcgtgttcagcatcatcaccagggtcgaggccacccactcccagacccagggaacctgccccgagagcataagggtccacaacgccacctgcctctccgacgccgactgcgtggctggggagctggacatgctgggaaacggcctgaggaccgggcgctgtgtgccctattaccaggggccctccaagacctgcgaggtgttcggctggtgcccggtggaagatggggcctctgtcagccaatttctgggtacgatggccccaaatttcaccatcctcatcaagaacagcatccactaccccaaattccacttctccaagggcaacatcgccgaccgcacagacgggtacctgaagcgctgcacgttccacgaggcctccgacctctactgccccatcttcaagctgggctttatcgtggagaaggctggggagagcttcacagagctcgcacacaagggtggtgtcatcggggtcattatcaactgggactgtgacctggacctgcctgcatcggagtgcaaccccaagtactccttccggaggcttgaccccaagcacgtgcctgcctcgtcaggctacaacttcaggtttgccaaatactacaagatcaatggcaccaccacccgcacgctcatcaaggcctacgggatccacattgacgtcattgtgcatggacaggtcgggaagttcagcctgattcccaccattattaatctggccacagctctgacttccgtcggggtggtaaggaaccctctctggggtcccagcgggtgcggggggtccaccaggcccttacacaccggtctctgctggccccagggctccttcctgtgcgactggatcttgctaacattcatgaacaaaaacaaggtctacagccataagaaatttgacaaggtggtcgacggc

SEQ ID NO: 794 - protein, 114 aa, Homo sapiens
SAARSTRPPTSTAPSSSWALSWRRLGRASQSSHTRVVSSGSLSTGTVTWTCLHRSATPSTPSGGLTPSTCLPRQATTSGLPNTTRSMAPPPARSSRPTGSTLTSLCMDRSGSSA

SEQ ID NO: 795 - DNA, 1164 bp, Homo sapiens
  CDS (605)..(946)
cacaagctttgggactacgagacgcccaaggtgatcgtggtgaggaaccggcgcctgggggtcctgtaccgcgccgtgcagctgctcatcctgctctacttcgtgtggtacgtattcatcgtgcagaaaagctaccaggagagcgagacgggccccgagagctccatcatcaccaaggtcaaggggatcaccacgtccgagcacaaagtgtgggacgtggaggagtacgtgaagccccccgaggggggcagcgtgttcagcatcatcaccagggtcgaggccacccactcccagacccagggaacctgccccgagagcataagggtccacaacgccacctgcctctccgacgccgactgcgtggctggggagctggacatgctgggaaacggcctgaggaccgggcgctgtgtgccctattaccaggggccctccaagacctgcgaggtgttcggctggtgcccggtggaagatggggcctctgtcagccaatttctgggtacgatggccccaaatttcaccatcctcatcaagaacagcatccactaccccaaattccacttctccaagggcaacatcgccgaccgcacagacgggtacctgaagcgctgcacgttccacgaggcctccgacctctactgccccatcttcaagctgggctttatcgtggagaaggctggggagagcttcacagagctcgcacacaagggtggtgtcatcggggtcattatcaactgggactgtgacctggacctgcctgcatcggagtgcaaccccaagtactccttccggaggcttgaccccaagcacgtgcctgcctcgtcaggctacaacttcaggtttgccaaatactacaagatcaatggcaccaccacccgcacgctcatcaaggcctacgggatccgcattgacgtcattgtgcatggacaggtcgggaagttcagcctgattcccaccattattaatctggccacagctctgacttccgtcggggtggtaaggaaccctctctggggtcccagcgggtgcggggggtccaccaggcccttacacaccggtctctgctggccccagggctccttcctgtgcgactggatcttgctaacattcatgaacaaaaacaaggtctacagccataagaaatttgacaaggtggtcgacggc

SEQ ID NO: 796 - protein, 114 aa, Homo sapiens
SAARSTRPPTSTAPSSSWALSWRRLGRASQSSHTRVVSSGSLSTGTVTWTCLHRSATPSTPSGGLTPSTCLPRQATTSGLPNTTRSMAPPPARSSRPTGSALTSLCMDRSGSSA

SEQ ID NO: 797 - DNA, 1087 bp, Homo sapiens
  CDS (606)..(947)
caccaagctttgggactacgagacgcccaaggtgatcgtggtgaggaaccggcgcctgggggtcctgtaccgcgccgtgcagctgctcatcctgctctacttcgtgtggtacgtattcatcgtgcagaaaagctaccaggagagcgagacgggccccgagagctccatcatcaccaaggtcaaggggatcaccacgtccgagcacaaagtgtgggacgtggaggagtacgtgaagccccccgaggggggcagcgtgttcagcatcatcaccagggtcgaggccacccactcccagacccagggaacctgccccgagagcataagggtccacaacgccacctgcctctccgacgccgactgcgtggctggggagctggacatgctgggaaacggcctgaggaccgggcgctgtgtgccctattaccaggggccctccaagacctgcgaggtgttcggctggtgcccggtggaagatggggcctctgtcagccaatttctgggtacgatggccccaaatttcaccatcctcatcaagaacagcatccactaccccaaattccacttctccaagggcaacatcgccgaccgcacagacgggtacctgaagcgctgcacgttccacgaggcctccgacctctactgccccatcttcaagctgggctttatcgtggagaaggctggggagagcttcacagagctcgcacacaagggtggtgtcatcggggtcattatcaactgggactgtgacctggacctgcctgcatcggagtgcaaccccaagtactccttccggaggcttgaccccaagcacgtgcctgcctcgtcaggctacaacttcaggtttgccaaatactacaagatcaatggcaccaccacccgcacgctcatcaaggcctacgggatccgcattgacgtcattgtgcatggacaggccgggaagttcagcctgattcccaccattattaatctggccacagctctgacttccgtcggggtgggctccttcctgtgcgactggatcttgctaacattcatgaacaaaaacaaggtctacagccataagaaatttgacaaggtggtcgacggc

SEQ ID NO: 798 - protein, 114 aa, Homo sapiens
SAARSTRPPTSTAPSSSWALSWRRLGRASQSSHTRVVSSGSLSTGTVTWTCLHRSATPSTPSGGLTPSTCLPRQATTSGLPNTTRSMAPPPARSSRPTGSALTSLCMDRPGSSA

SEQ ID NO: 799 - DNA, 1087 bp, Homo sapiens
  CDS (606)..(947)
caccaagctttgggactacgagacgcccaaggtgatcgtggtgaggaaccggcgcctgggggtcctgtaccgcgccgtgcagctgctcatcctgctctacttcgtgtggtacgtattcatcgtgcagaaaagctaccaggagagcgagacgggccccgagagctccatcatcaccaaggtcaaggggatcaccacgtccgagcacaaagtgtgggacgtggaggagtacgtgaagccccccgaggggggcagcgtgttcagcatcatcaccagggtcgaggccacccactcccagacccagggaacctgccccgagagcataagggtccacaacgccacctgcctctccgacgccgactgcgtggctggggagctggacatgctgggaaacggcctgaggaccgggcgctgtgtgccctattaccaggggccctccaagacctgcgaggtgttcggctggtgcccggtggaagatggggcctctgtcagccaatttctgggtacgatggccccaaatttcaccatcctcatcaagaacagcatccactaccccaaattccacttctccaagggcaacatcgccgaccgcacagacgggtacctgaagcgctgcacgttccacgaggcctccgacctctactgccccatcttcaagctgggctttatcgtggagaaggctggggagagcttcacagagctcgcacacaagggtggtgtcatcggggtcattatcaactgggactgtgacctggacctgcctgcatcggagtgcaaccccaagtactccttccggaggcttgaccccaagcacgtgcctgcctcgtcaggctacaacttcaggtttgccaaatactacaagatcaatggcaccaccacccgcacgctcatcaaggcctacgggatccgcattgacgtcattgtgcatggacaggccgggaagttcatcctgattcccaccattattaatctggccacagctctgacttccgtcggggtgggctccttcctgtgcgactggatcttgctaacattcatgaacaaaaacaaggtctacagccataagaaatttgacaaggtggtcgacggc

SEQ ID NO: 800 - protein, 114 aa, Homo sapiens
SAARSTRPPTSTAPSSSWALSWRRLGRASQSSHTRVVSSGSLSTGTVTWTCLHRSATPSTPSGGLTPSTCLPRQATTSGLPNTTRSMAPPPARSSRPTGSALTSLCMDRPGSSS

SEQ ID NO: 801 - DNA, 1020 bp, Homo sapiens
  CDS (91)..(930)
aggactctcctctcttctccctgctggctccagaccagagtccaagccctaggcagtgccacccttacccagcccagccttgaagacagaatgagaggggtttcctgtctccaggtcctgctccttctggtgctgggagctgctgggactcagggaaggaagtctgcagcctgcgggcagccccgcatgtccagtcggatcgttgggggccgggatggccgggacggagagtggccgtggcaggcgagcatccagcatcgtggggcacacgtgtgcggggggtcgctcatcgccccccagtgggtgctgacagcggcgcactgcttccccaggagggcactgccagctgagtaccgcgtgcgcctgggggcgctgcgtctgggctccacctcgccccgcacgctctcggtgcccgtgcgacgggtgctgctgcccccggactactccgaggacggggcccgcggcgacctggcactgctgcagctgcgtcgcccggtgcccctgagcgctcgcgtccaacccgtctgcctgcccgtgcccggcgcccgcccgccgcccggcacaccatgccgggtcaccggctggggcagcctccgcccaggagtgcccctcccagagtggcgaccgctacaaggagtaagggtgccgctgctggactcgcgcacctgcgacggcctctaccacgtgggcgcggacgtgccccaggctgagcgcattgtgctgcctgggagtctgtgtgccggctacccccagggccacaaggacgcctgccagggtgattctgggggacctctgacctgcctgcagtctgggagctgggtcctggtgggcgtggtgagctggggcaagggttgtgccctgcccaaccgtccaggggtctacaccagtgtggccacatatagcccctggattcaggctcgcgtcagcttctaatgctagccggtgaggctgacctggagccagctgctggggtccctcagcctcctggttcatccaggcacctgcctataccccacatcc

SEQ ID NO: 802 - protein, 280 aa, Homo sapiens
MRGVSCLQVLLLLVLGAAGTQGRKSAACGQPRMSSRIVGGRDGRDGEWPWQASIQHRGAHVCGGSLIAPQWVLTAAHCFPRRALPAEYRVRLGALRLGSTSPRTLSVPVRRVLLPPDYSEDGARGDLALLQLRRPVPLSARVQPVCLPVPGARPPPGTPCRVTGWGSLRPGVPLPEWRPLQGVRVPLLDSRTCDGLYHVGADVPQAERIVLPGSLCAGYPQGHKDACQGDSGGPLTCLQSGSWVLVGVVSWGKGCALPNRPGVYTSVATYSPWIQARVSF

SEQ ID NO: 803 - DNA, 1606 bp, Homo sapiens
  CDS (69)..(920)
ccacgcgtccgaccagagtccaagccctaggcagtgccacccttacccagcccagccttgaagacagaatgagaggggtttcctgtctccaggtcctgctccttctggtgctgggagctgctgggactcagggaaggaagtctgcagcctgcgggcagccccgcatgtccagtcggatcgttgggggccgggatggccgggacggagagtggccgtggcaggcgagcatccagcatcctggggcacacgtgtgcggggggtcgctcatcgccccccagtgggtgctgacagcggcgcactgcttccccaggagggcactgccagctgagtaccgcgtgcgcctgggggcgctgcgtctgggctccacctcgccccgcacgctctcggtgcccgtgcgacgggtgctgctgcccccggactactccgaggacggggcccgcggcgacctggcactgctgcagctgcgtcgcccggtgcccctgagcgctcgcgtccaacccgtctgcctgcccgtgcccggcgcccgcccgccgcccggcacaccatgccgggtcaccggctggggcagcctccgcccaggagtgcccctcccagagtggcgaccgctacaaggagtaagggtgccgctgctggactcgcgcacctgcgacggcctctaccacgtgggcgcggacgtgccccaggctgagcgcattgtgctgcctgggagtctgtgtgccggctacccccagggccacaaggacgcctgccagggtgattctgggggacctctgacctgcctgcagtctgggagctgggtcctggtgggcgtggtgagctggggcaagggttgtgccctgcccaaccgtccaggggtctacaccagtgtggccacatatagcccctggattcaggctcgcgtcacttctaatgctagccggtgaggctgacctggagccagctgctggggtccctcagcctcctggttcatccaggcacctgcctataccccacatcccttctgcctcgaggccaagatgcctaaaaaagctaaaggccaccccaccccccacccaccaccttctggctcctctcctctttggggatcaccagctctgactccaccaaccctcatccaggaatctgccatgagtcccagggagtcacactccccactcccttcctggcttgtatttacttttcttggccctggccagggctgggcgcaaggcacgcagtgatgggcaaaccaattgctgcccatctggcctgtgtgcccatctttttctggagaaagtcagattcacagcatgacagagatttgacaccagggagatcctccatagctggctttgaggacacggggaccacagccatgagcggcctctaagagctgagagacagccggcagggaatcggaaccctcagacccacagccgcaaggcactggattctggcagcaccctgaaggagctgggaagtaagttcttccccagcctccagataagagccccgccggccaatcccttcatttcaacctaaagagaccctaagcagagaacctagctgagccactcctgacctacaaagttgtgacttaataaatgtgtgctttaagctgccaaaa

SEQ ID NO: 804 - protein, 284 aa, Homo sapiens
MRGVSCLQVLLLLVLGAAGTQGRKSAACGQPRMSSRIVGGRDGRDGEWPWQASIQHPGAHVCGGSLIAPQWVLTAAHCFPRRALPAEYRVRLGALRLGSTSPRTLSVPVRRVLLPPDYSEDGARGDLALLQLRRPVPLSARVQPVCLPVPGARPPPGTPCRVTGWGSLRPGVPLPEWRPLQGVRVPLLDSRTCDGLYHVGADVPQAERIVLPGSLCAGYPQGHKDACQGDSGGPLTCLQSGSWVLVGVVSWGKGCALPNRPGVYTSVATYSPWIQARVTSNASR

SEQ ID NO: 805 - DNA, 762 bp, Homo sapiens
  CDS (7)..(756)
agatctcagccccgcatgtccagtcggatcgttgggggccgggatggccgggacggagagtggccgtggcaggcgagcatccagcatcgtggggcacacgtgtgcggggggtcgctcatcgccccccagtgggtgctgacagcggcgcactgcttccccaggagggcactgccagctgagtaccgcgtgcgcctgggggcgctgcgtctgggctccacctcgccccgcacgctctcggtgcccgtgcgacgggtgctgctgcccccggactactccgaggacggggcccgcggcgacctggcactgctgcagctgcgtcgcccggtgcccctgagcgctcgcgtccaacccgtctgcctgcccgtgcccgccgcccgcccgccgcccggcacaccatgccgggtcaccggctggggcagcctccgcccaggagtgcccctcccagaggggcgaccgctacaaggagtaagggtgccgctgctggactcgcgcacctgcgacggcctctaccacgtgggcgcggacgtgccccaggctgagcgcattgtgctgcctgggagtctgtgtgccggctacccccaggtccacaaggacgcctgccaggtgtgcacccagcctccccagcctccggagtcccctccctgtgcccagctccctccctccctgaactccaggacccaggacatcccaactcaggctcaggatcctggcctccaacctagaggcaccacgccaggggtctggaaccctgagaacctcgag

SEQ ID NO: 806 - protein, 250 aa, Homo sapiens
QPRMSSRIVGGRDGRDGEWPWQASIQHRGAHVCGGSLIAPQWVLTAAHCFPRRALPAEYRVRLGALRLGSTSPRTLSVPVRRVLLPPDYSEDGARGDLALLQLRRPVPLSARVQPVCLPVPAARPPPGTPCRVTGWGSLRPGVPLPEGRPLQGVRVPLLDSRTCDGLYHVGADVPQAERIVLPGSLCAGYPQVHKDACQVCTQPPQPPESPPCAQLPPSLNSRTQDIPTQAQDPGLQPRGTTPGVWNPEN

SEQ ID NO: 807 - DNA, 762 bp, Homo sapiens
  CDS (7)..(756)
agatctcagccccgcatgtccagtcggatcgttgggggccgggatggccgggacggagagtggccgtggcaggcgagcatccagcatcgtggggcacacgtgtgcggggggtcgctcatcgccccccagtgggtgctgacagcggcgcactgcttccccaggagggcactgccagctgagtaccgcgtgcgcctgggggcgctgcgtctgggctccacctcgccccgcacgctctcggtgcccgtgcgacgggtgctgctgcccccggactactccgaggacggggcccgcggcgacctggcactgctgcagctgcgtcgcccggtgcccctgagcgctcgcgtccaacccgtctgcctgcccgtgcccggcgcccgcccgccgcccggcacaccatgccgggtcaccggctggggcagcctccgcccaggagtgcccctcccagagtggcgaccgctacaaggagtaagggtgccgctgctggactcgcgcacctgcgacggcctctaccacgtgggcgcggacgtgccccaggctgagcgcattgtgctgcctgggagtctgtgtgccggctacccccagggccacaaggacgcctgccaggtgtgcacccagcctccccagcctccggagtcccctccctgtgcccagctccctccctccctgaactccaggacccaggacatcccaactcaggctcaggatcctggcctccaacctagaggcaccacgccaggggtctggaaccctgagaacctcgag

SEQ ID NO: 808 - protein, 250 aa, Homo sapiens
QPRMSSRIVGGRDGRDGEWPWQASIQHRGAHVCGGSLIAPQWVLTAAHCFPRRALPAEYRVRLGALRLGSTSPRTLSVPVRRVLLPPDYSEDGARGDLALLQLRRPVPLSARVQPVCLPVPGARPPPGTPCRVTGWGSLRPGVPLPEWRPLQGVRVPLLDSRTCDGLYHVGADVPQAERIVLPGSLCAGYPQGHKDACQVCTQPPQPPESPPCAQLPPSLNSRTQDIPTQAQDPGLQPRGTTPGVWNPEN

SEQ ID NO: 809 - DNA, 1151 bp, Homo sapiens
  CDS (90)..(1055)
taatctttgcaggtgggatagcacaggttgaactctaatcatatatactgtagaaggtatatatagaaggtgaagaagccctgtaaaaaatgacaaggagatttccaggagccatgcttccctctaatatcacctcaacacatccagctgtctttttgttggtaggaattcctggtttggaacacctgcatgcctggatctccatccccttctgctttgcttatactctggccctgctaggcaactgtacccttctcttcattatccaggctgatgcagccctccatgaacccatgtacctctttctggccatgttggcaaccattgacttggttctttcttctacaacgctgcccaaaatgcttgccatattctggttcagggatcaggagatcaacttctttgcctgtctggtccagatgttcttccttcactccttctccatcatggagtcagcagtgctgctggccatggcctttgaccgctatgtggccatctgcaagccattgcactacacgacggtcctgactgggtccctcatcaccaagattggcatggctgctgtggcccgggctgtgacactaatgactccactccccttcctgctcagacgcttccactactgccgaggcccagtgattgcccattgctactgtgaacacatggctgtggtaaggctggcgtgtggggacactagcttcaacaatatctatggcattgctgtggccatgtttagtgtggtgttggacctgctctttgttatcctgtcttatgtcttcatccttcaggcagttctccagcttgcctctcaggaggcccgctacaaagcatttgggacatgtgtgtctcacataggtgccatcctgtccacctacactccagtagtcatctcttcagtcatgcaccgtgtagcccgccatgctgcccctcgtgtccacatactccttgctattttctatctccttttcccacccatggtcaatcctatcatatatggagtcaagaccaagcagattcgtgagtatgtgctcagtctattccagagaaagaacatgtagatggatagttctctttttttatcccacttgccaagtaatgagaatgctggattggggttgaggggaaaaatctaaataggaaaattgcagagt

SEQ ID NO: 810 - protein, 322 aa, Homo sapiens
MTRRFPGAMLPSNITSTHPAVFLLVGIPGLEHLHAWISIPFCFAYTLALLGNCTLLFIIQADAALHEPMYLFLAMLATIDLVLSSTTLPKMLAIFWFRDQEINFFACLVQMFFLHSFSIMESAVLLAMAFDRYVAICKPLHYTTVLTGSLITKIGMAAVARAVTLMTPLPFLLRRFHYCRGPVIAHCYCEHMAVVRLACGDTSFNNIYGIAVAMFSVVLDLLFVILSYVFILQAVLQLASQEARYKAFGTCVSHIGAILSTYTPVVISSVMHRVARHAAPRVHILLAIFYLLFPPMVNPIIYGVKTKQIREYVLSLFQRKNM

SEQ ID NO: 811 - DNA, 981 bp, Homo sapiens
  CDS (1)..(981)
ggatccaccatgacaaggagatttccaggagccatgcttccctctaatatcacctcaacacatccagctgtctttttgttggtaggaattcctggtttggaacacctgcatgcctggatctccatccccttctgctttgcttatactctggccctgctaggcaactgtacccttctcttcattatccaggctgatgcagccctccatgaacccatgtacctctttctggccatgttggcaaccattgacttggttctttcttctacaacgctgcccaaaatgcttgccatattctggttcagggatcaggagatcaacttctttgcctgtctggtccagatgttcttccttcactccttctccatcatggagtcagcagtgctgctggccatggcctttgaccgctatgtggccatctgcaagccattgcactacacgacggtcctgactgggtccctcatcaccaagattggcatggctgctgtggcccgggctgtgacactaatgactccactccccttcctgctcagacgcttccactactgccgaggcccagtgattgcccattgctactgtgaacacatggctgtggtaaggctggcgtgtggggacactagcttcaacaatatctatggcattgctgtggccatgtttattgtggtgttggacctgctctttgttatcctgtcttatgtcttcatccttcaggcagttctccagcttgcctctcaggaggcccgctacaaggcatttgggacatgtgtgtctcacataggtgccatcctgtccacctacactccagtagtcatctcttcagtcatgcaccgtgtagcccgccatgctgcccctcgtgtccacatactccttgctattttctatctccttttcccacccatggtcaatcctatcatatatggagtcaagaccaagcagattcgtgagtatgtgctcagtctattccagagaaagaacatgctcgag

SEQ ID NO: 812 - protein, 327 aa, Homo sapiens
GSTMTRRFPGAMLPSNITSTHPAVFLLVGIPGLEHLHAWISIPFCFAYTLALLGNCTLLFIIQADAALHEPMYLFLAMLATIDLVLSSTTLPKMLAIFWFRDQEINFFACLVQMFFLHSFSIMESAVLLAMAFDRYVAICKPLHYTTVLTGSLITKIGMAAVARAVTLMTPLPFLLRRFHYCRGPVIAHCYCEHMAVVRLACGDTSFNNIYGIAVAMFIVVLDLLFVILSYVFILQAVLQLASQEARYKAFGTCVSHIGAILSTYTPVVISSVMHRVARHAAPRVHILLAIFYLLFPPMVNPIIYGVKTKQIREYVLSLFQRKNMLE

SEQ ID NO: 813 - DNA, 981 bp, Homo sapiens
  CDS (1)..(981)
ggatccaccatgacaaggagatttccaggagccatgcttccctctaatatcacctcaacacatccagctgtctttttgttggtaggaattcctggtttggaacacctgcatgcctggatctccatccccttctgctttgcttatactctggccctgctaggcaactgtacccttctcttcattatccaggctgatgcagccctccatgaacccatgtacctctttctggccatgttggcaaccattgacttggttctttcttctacaacgctgcccaaaatgcttgccatattctggttcagggatcaggagatcaacttctttgcctgtctggtccagatgttcttccttcactccttctccatcatggagtcagcagtgctgctggccatggcctttgaccgctatgtggccatctgcaagccattgcactacacgacggtcctgactgggtccctcatcaccaagattggcatggctgctgtggcccgggctgtgacactaatgactccactccccttcctgctcagacgcttccactactgccgaggcccagtgattgcccattgctactgtgaacacatggctgtggtaaggctggcgtgtggggacactagcttcaacaatatctatggcattgctgtggccatgtttattgtggtgttggacctgctctttgttatcctgtcttatgtcttcatccttcaggcagttctccagcttgcctctcaggaggcccgctacaaggcatttgggacatgtgcgtctcacataggtgccatcctgtccacctacactccagtagtcatctcttcagtcatgcaccgtgtagcccgccatgctgcccctcgtgtccacatactccttgctattttctatctccttttcccacccatggtcaatcctatcatatatggagtcaagaccaagcagattcgtgagtatgtgctcagtctattccagagaaagaacatgctcgag

SEQ ID NO: 814 - protein, 327 aa, Homo sapiens
GSTMTRRFPGAMLPSNITSTHPAVFLLVGIPGLEHLHAWISIPFCFAYTLALLGNCTLLFIIQADAALHEPMYLFLAMLATIDLVLSSTTLPKMLAIFWFRDQEINFFACLVQMFFLHSFSIMESAVLLAMAFDRYVAICKPLHYTTVLTGSLITKIGMAAVARAVTLMTPLPFLLRRFHYCRGPVIAHCYCEHMAVVRLACGDTSFNNIYGIAVAMFIVVLDLLFVILSYVFILQAVLQLASQEARYKAFGTCASHIGAILSTYTPVVISSVMHRVARHAAPRVHILLAIFYLLFPPMVNPIIYGVKTKQIREYVLSLFQRKNMLE

SEQ ID NO: 815 - DNA, 981 bp, Homo sapiens
  CDS (1)..(981)
ggatccaccaagacaaggagatttccaggagccatgcttccctctaatatcacctcaacacatccagctgtctttttgttggtaggaattcctggtttggaacacctgcatgcctggatctccatccccttctgctttgcttatactctggccctgctaggcaactgtacccttctcttcattatccaggctgatgcagccctccatgaacccatgtacctctttctggccatgttggcaaccattgacttggttctttcttctacaacgctgcccaaaatgcttgccatattctggttcagggatcaggagatcaacttctttgcctgtctggtccagatgttcttccttcactccttctccatcatggagtcagcagtgctgctggccatggcctttgaccgctatgtggccatctgcaagccattgcactacacgacggtcctgactgggtccctcatcaccaagattggcatggctgctgtggcccgggctgtgacactaatgactccactccccttcctgctcagacgcttccactactgccgagacccagtgattgcccattgctactgtgaacacatggctgtggtaaggctggcgtgtggggacactagcttcaacaatatctatggcattgctgtggccatgtttattgtggtgttggacctgctctttgttatcctgtcttatgtcttcatccttcaggcagttctccagcttgcctctcaggaggcccgctacaaggcatttgggacatgtgtgtctcacataggtaccatcctgtccacctacactccagtagtcatctcttcagtcatgcaccgtgtagcccgccatgctgcccctcgtgtccacatactccttgctattttctatctccttttcccacccatggtcaatcctatcatatatggagtcaagaccaagcagattcgtgagtatgtgctcagtctattccagagaaagaacatgctcgag

SEQ ID NO: 816 - protein, 327 aa, Homo sapiens
GSTKTRRFPGAMLPSNITSTHPAVFLLVGIPGLEHLHAWISIPFCFAYTLALLGNCTLLFIIQADAALHEPMYLFLAMLATIDLVLSSTTLPKMLAIFWFRDQEINFFACLVQMFFLHSFSIMESAVLLAMAFDRYVAICKPLHYTTVLTGSLITKIGMAAVARAVTLMTPLPFLLRRFHYCRDPVIAHCYCEHMAVVRLACGDTSFNNIYGIAVAMFIVVLDLLFVILSYVFILQAVLQLASQEARYKAFGTCVSHIGTILSTYTPVVISSVMHRVARHAAPRVHILLAIFYLLFPPMVNPIIYGVKTKQIREYVLSLFQRKNMLE

SEQ ID NO: 817 - DNA, 981 bp, Homo sapiens
  CDS (1)..(981)
ggatccaccatgacaaggagatttccaggagccatgcttccctctaatatcacctcaacacatccagctgtctttttgttggtaggaattcctggtttggaacacctgcatgcctggatctccatccccttctgctttgcttatactctggccctgctaggcaactgtacccttctcttcattatccgggctgatgcagccctccatgaacccatgtacctctttctggccatgttggcaaccattgacttggttctttcttctacaacgctgcccaaaatgcttgccatattctggttcagggatcaggagatcaacttctttgcctgtctggtccagatgttcttccttcactccttctccatcatggagtcagcagtgctgctggccatggcctttgaccgctatgtggccatctgcaagccattgcactacacgacggtcctgactgggtccctcatcaccaagattggcatggctgctgtggcctgggctgtgacactaatgactccactccccttcctgctcagacgcttccactactgccgaggcccagtgattgcccattgctactgtgaacacatggctgtggtaaggctggcgtgtggggacactagcttcaacaatatctatggcattgctgtggccatgtttattgtggtgttggacctgctctttgttatcctgtcttatgtcttcatccttcaggcagttctccagcttgcctctcaggaggcccgctacaaggcatttgggacatgtgtgtctcacataggtgccatcctgtccacctacactccagtagtcatctcttcagtcatgcaccgtgtagcccgccatgctgcccctcgtgtccacatactccttgctattttctatctccttttcccacccatggtcaatcctatcatatatggagtcaagaccaagcagattcgtgagtatgtgctcagtctattccagagaaagaacatgctcgag

SEQ ID NO: 818 - protein, 327 aa, Homo sapiens
GSTMTRRFPGAMLPSNITSTHPAVFLLVGIPGLEHLHAWISIPFCFAYTLALLGNCTLLFIIRADAALHEPMYLFLAMLATIDLVLSSTTLPKMLAIFWFRDQEINFFACLVQMFFLHSFSIMESAVLLAMAFDRYVAICKPLHYTTVLTGSLITKIGMAAVAWAVTLMTPLPFLLRRFHYCRGPVIAHCYCEHMAVVRLACGDTSFNNIYGIAVAMFIVVLDLLFVILSYVFILQAVLQLASQEARYKAFGTCVSHIGAILSTYTPVVISSVMHRVARHAAPRVHILLAIFYLLFPPMVNPIIYGVKTKQIREYVLSLFQRKNMLE

SEQ ID NO: 819 - DNA, 981 bp, Homo sapiens
  CDS (1)..(981)
ggatccaccatgacaaggagatttccaggagccatgcttccctctaatatcacctcaacacatccagctgtctttttgttggtaggaattcctggtttggaacacctgcatgcctggatctccatccccctctgctttgcttatactctggccctgctaggcaactgtacccttctcttcattatccaggctgatgcagccctccatgaacccatgtacctctttctggccatgttggcaaccattgacttggttctttcttctacaacgctgcccaaaatgcttgccatattctggttcagggatcaggagatcaacttctttgcctgtctggtccagatgttcttccttcactccttctccatcatggagtcagcagtgctgctggccatggcctttgaccgctatgtggccatctgcaagccattgcactacacgacggtcctgactgggtccctcatcaccaagattggcatggctgctgtggcccgggctgtgacactaatgactccactccccttcctgctcagacgcttccactactgccgaggcccagtgattgcccattgctactgtgaacacatggctgtggtaaggctggcgtgtggggacactagcttcaacaatatctatggcattgctgtggccatgtttattgtggtgttggacctgctctttgttatcctgtcttatgtcttcatccttcaggcagttctccagcttgcctctcaggaggcccgctacaaggcatttgggacatgtgtgtctcacataggtgccatcctgtccacctacactccagtagtcatctcttcagtcatgcaccgtgtagcccgccatgctgcccctcgtgtccacatactccttgctattttctatctccttttcccacccatggtcaatcctatcatatatggagtcaagaccaagcagattcgtgagtatgtgctcagtctattccagagaaagaacatgctcgag

SEQ ID NO: 820 - protein, 327 aa, Homo sapiens
GSTMTRRFPGAMLPSNITSTHPAVFLLVGIPGLEHLHAWISIPLCFAYTLALLGNCTLLFIIQADAALHEPMYLFLAMLATIDLVLSSTTLPKMLAIFWFRDQEINFFACLVQMFFLHSFSIMESAVLLAMAFDRYVAICKPLHYTTVLTGSLITKIGMAAVARAVTLMTPLPFLLRRFHYCRGPVIAHCYCEHMAVVRLACGDTSFNNIYGIAVAMFIVVLDLLFVILSYVFILQAVLQLASQEARYKAFGTCVSHIGAILSTYTPVVISSVMHRVARHAAPRVHILLAIFYLLFPPMVNPIIYGVKTKQIREYVLSLFQRKNMLE

SEQ ID NO: 821 - DNA, 966 bp, Homo sapiens
  CDS (1)..(966)
atgacaaggagatttccaggagccatgcttccctctaatatcacctcaacacatccagctgtctttttgttggtaggaattcctggtttggaacacctgcatgcctggatctccatccccttctgctttgcttatactctggccctgctaggcaactgtacccttctcttcattatccaggctgatgcagccctccatgaacccatgtacctctttctggccatgttggcaaccattgacttggttctttcttctacaacgctgcccaaaatgcttgccatattctggttcagggatcaggagatcaacttctttgcctgtctggtccagatgttcttccttcactccttctccatcatggagtcagcagtgctgctggccatggcctttgaccgctatgtggccatctgcaagccattgcactacacgacggtcctgactgggtccctcatcaccaagattggcatggctgctgtggcccgggctgtgacactaatgactccactccccttcctgctcagacgcttccactactgccgaggcccagtgattgcccattgctactgtgaacacatggctgtggtaaggctggcgtgtggggacactagcttcaacaatatctatggcattgctgtggccatgtttattgtggtgttggacctgctctttgttatcctgtcttatgtcttcatccttcaggcagttctccagcttgcctctcaggaggcccgctacaaggcatttgggacatgtgtgtctcacataggtgccatcctgtccacctacactccagtagtcatctcttcagtcatgcaccgtgtagcccgccatgctgcccctcgtgtccacatacttcttgctattttctatctccttttcccacccatggtcaatcctatcatatatggagtcaagaccaagcagattcgtgagtatgtgctcagtctattccagagaaagaacatg

SEQ ID NO: 822 - protein, 322 aa, Homo sapiens
MTRRFPGAMLPSNITSTHPAVFLLVGIPGLEHLHAWISIPFCFAYTLALLGNCTLLFIIQADAALHEPMYLFLAMLATIDLVLSSTTLPKMLAIFWFRDQEINFFACLVQMFFLHSFSIMESAVLLAMAFDRYVAICKPLHYTTVLTGSLITKIGMAAVARAVTLMTPLPFLLRRFHYCRGPVIAHCYCEHMAVVRLACGDTSFNNIYGIAVAMFIVVLDLLFVILSYVFILQAVLQLASQEARYKAFGTCVSHIGAILSTYTPVVISSVMHRVARHAAPRVHILLAIFYLLFPPMVNPIIYGVKTKQIREYVLSLFQRKNM

SEQ ID NO: 823 - DNA, 777 bp, Homo sapiens
  CDS (1)..(777)
gccctccatgaacccatgtacctctttctggccatgttggcaaccattgacttggttctttcttctacaacgctgcccaaaatgcttgccatattctggttcagggatcaggagatcaacttctttgcctgtctggtccagatgttcttccttcactccttctccatcatggagtcagcagtgctgctggccatggcctttgaccgctatgtggccatctgcaagccattgcactacacgacggtcctgactgggtccctcatcaccaagattggcatggctgctgtggcctgggctgtgacactaatgactccactccccttcctgctcagacgcttccactactgccgaggcccagtgattgcccattgctactgtgaacacatggctgtggtaaggctggcgtgtggggacactagcttcaacaatatctatggcattgctgtggccatgtctattgtggtgttggacctgctctttgttatcctgtcttatgtcttcatccttcaggcagttctccagcttgcctctcaggaggcccgctacaaggcatttgggacatgtgtgtctcacataggtgccatcctgtccacctacactccagtagtcatctcttcagtcatgcaccgtgtagcccgccatgctgcccctcgtgtccacatactccttgctattttctatctccttttcccacccatggtcaatcctatcatatatggagtcaagaccaagcagattcgtgagtatgtgctcagtctattccagagaaagaacatg

SEQ ID NO: 824 - protein, 259 aa, Homo sapiens
ALHEPMYLFLAMLATIDLVLSSTTLPKMLAIFWFRDQEINFFACLVQMFFLHSFSIMESAVLLAMAFDRYVAICKPLHYTTVLTGSLITKIGMAAVAWAVTLMTPLPFLLRRFHYCRGPVIAHCYCEHMAVVRLACGDTSFNNIYGIAVAMSIVVLDLLFVILSYVFILQAVLQLASQEARYKAFGTCVSHIGAILSTYTPVVISSVMHRVARHAAPRVHILLAIFYLLFPPMVNPIIYGVKTKQIREYVLSLFQRKNM

SEQ ID NO: 825 - DNA, 777 bp, Homo sapiens; identical to SEQ ID NO: 823
  CDS (1)..(777)

SEQ ID NO: 826 - protein, 259 aa, Homo sapiens; identical to SEQ ID NO: 824

SEQ ID NO: 827 - DNA, 789 bp, Homo sapiens
  CDS (7)..(783)
ggatccgccctccatgaacccatgtacctctttctggccatgttggcaaccattgacttggttctttcttctacaacgctgcccaaaatgcttgccatattctggttcagggatcaggagatcaacttctttgcctgtctggtccagatgttcttccttcactccttctccatcatggagtcagcagtgctgctggccatggcctttgaccgctatgtggccatctgcaagccattgcactacacgacggtcctgactgggtccctcatcaccaagattggcatggctgctgtggcccgggctgtgacactaatgactccactccccttcctgctcagacgcttccactactgccgaggcccagtgattgcccattgctactgtgaacacatggctgtggtaaggctggcgtgtggggacactagcttcaacaatatctatggcattgctgtggccatgtttattgtggtgttggacctgctctttgttatcctgtcttatgtcttcatccttcaggcagttctccagcttgcctctcaggaggcccgctacaaggcatttgggacatgtgtgtctcacataggtgccatcctgtccacctacactccagtagtcatctcttcagtcatgcaccgtgtagcccgccatgctgcccctcgtgtccacatactccttgctattttctatctccttttcccacccatggtcaatcctatcatatatggagtcaagaccaagcagattcgtgagtatgtgctcagtctattccagagaaagaacatgctcgag

SEQ ID NO: 828 - protein, 259 aa, Homo sapiens
ALHEPMYLFLAMLATIDLVLSSTTLPKMLAIFWFRDQEINFFACLVQMFFLHSFSIMESAVLLAMAFDRYVAICKPLHYTTVLTGSLITKIGMAAVARAVTLMTPLPFLLRRFHYCRGPVIAHCYCEHMAVVRLACGDTSFNNIYGIAVAMFIVVLDLLFVILSYVFILQAVLQLASQEARYKAFGTCVSHIGAILSTYTPVVISSVMHRVARHAAPRVHILLAIFYLLFPPMVNPIIYGVKTKQIREYVLSLFQRKNM

SEQ ID NO: 829 - DNA, 789 bp, Homo sapiens; identical to SEQ ID NO: 827
  CDS (7)..(783)

SEQ ID NO: 830 - protein, 259 aa, Homo sapiens; identical to SEQ ID NO: 828

SEQ ID NO: 831 - DNA, 807 bp, Homo sapiens
  CDS (1)..(807)
atgattctggaccatcgtctccacatggcaatgtactttttcctccgacatttgtccttcttagacctgtgtctcatttctgacacagtccccaaatccatcctcaactctgtcgcctccactgactccatctccttcctggggtgtgtgttgcagctcttcttggtggtactgctggctggatcagagattggcatccttactgccatgtcctatgaccgctatgctgccatctgctgccccctacactgtgaggctgtcatgagcagagggctctgtgtccagttgatggctctgtcctggctcaacagaggggccttgggactcttgtacacagctggaacattctctctgaatttttatggctctgatgagctacatcagttcttctgcgatgtccctgccctactaaagctcacttgttctaaagaacatgccatcattagtgtcagtgtggccattggggtctgttatgcattttcatgtttagtttgcattgtagtttcctatgtgtacattttctctgctgtgttaaggatatcacagagacagagacaatccaaagccttttccaactgtgtgcctcacctcattgttgtcactgtgtttcttgtaacaggtgctgttgcttatttaaagccagggtctgatgcaccttctattctagacttgctggtgtctgtgttctattctgtcgcacctccaaccttgaaccctgttatctactgtctgaagaacaaggacattaaatccgctctgagtaaagtcctgtggaatgttagaagcagtggggtaatgaaagatgac

SEQ ID NO: 832 - protein, 269 aa, Homo sapiens
MILDHRLHMAMYFFLRHLSFLDLCLISDTVPKSILNSVASTDSISFLGCVLQLFLVVLLAGSEIGILTAMSYDRYAAICCPLHCEAVMSRGLCVQLMALSWLNRGALGLLYTAGTFSLNFYGSDELHQFFCDVPALLKLTCSKEHAIISVSVAIGVCYAFSCLVCIVVSYVYIFSAVLRISQRQRQSKAFSNCVPHLIVVTVFLVTGAVAYLKPGSDAPSILDLLVSVFYSVAPPTLNPVIYCLKNKDIKSALSKVLWNVRSSGVMKDD

SEQ ID NO: 833 - DNA, 995 bp, Homo sapiens
  CDS (21)..(965)
ggcgcttataattttgaactatgaccaatcagacacagatgatggaattcttgcttgtgagatttactgagaattgggtgctcctgaggctgcatgctttgctcttctcactgatctacctcacggctgtgctgatgaatttagtcatcattctcctcatgattctggaccatcgtctccacatggcaatgtactttttcctccgacatttgtccttcttagacctgtgtctcatttctgccacagtccccaaatccatcctcaactctgtcgcctccactgactccatctccttcctggggtgtgtgttgcagctcttcttggtggtactgctggctggatcagagattggcatccttactgccatgtcctatgaccgctatgctgccatctgctgccccctacactgtgaggctgtcatgagcagagggctctgtgtccagttgatggctctgtcctggctcaacagaggggccttgggactcttgtacacagctggaacattctctctgaatttttatggctctgatgagctacatcagttcttctgcgatgtccctgccctactaaagctcacttgttctaaagaacatgccatcattagtgtcagtgtggccattggggtctgttatgcattttcatgtttagtttgcattgtagtttcctatgtgtacattttctctgctgtgttaaggatatcacagagacagagacaatccaaagccttttccaactgtgtgcctcacctcattgttgtcactgtgtttcttgtaacaggtgctgttgcttatttaaagccagggtctgatgcaccttctattctagacttgctggtgtctgtgttctattctgtcgcacctccaaccttgaaccctgttatctactgtctgaagaacaaggacattaaatccgctctgagtaaagtcctgtggaatgttagaagcagtggggtaatgaaagatgactaaagttgaagatgggaagtactttttttg

SEQ ID NO: 834 - protein, 315 aa, Homo sapiens; identical to SEQ ID NO: 134

SEQ ID NO: 835 - DNA, 819 bp, Homo sapiens
  CDS (1)..(819)
ggatccatgattctggaccatcgtctccacatggcaatgtactttttcctccgacatttgtccttcttagacctgtgtctcatttctgccacagtccccaaatccatcctcaactctgtcgcctccactgactccatctccttcctggggtgtgtgttgcagctcttcttggtggtactgctggctggatcagagattggcatccttactgccatgtcctatgaccgctatgctgccatctgctgccccctacactgtgaggctgtcatgagcagagggctctgtgtccagttgatggctctgtcctggctcaacagaggggccttgggactcttgtacacagctggaacattctctctgaatttttatggctctgatgagctacatcagttcttctgcgatgtccctgccctactaaagctcacttgttctaaagaacatgccatcattagtgtcagtgtggccattggggtctgttatgcattttcatgtttagtttgcattgtagtttcctatgtgtacattttctctgctgtgttaaggatatcacagagacagagacaatccaaagccttttccaactgtgtgcctcacctcattgttgtcactgtgtttcttgtaacaggtgctgttgcttatttaaagccagggtctgatacaccttctattctagacttgctggtgtctgtgttctattctgtcgcacctccaaccttgaaccctgttatctactgtctgaagaacaaggacattaaatccgctctgagtaaagtcctgtggaatgttagaagcagtggggtaatgaaagatgacctcgag

SEQ ID NO: 836 - protein, 273 aa, Homo sapiens
GSMILDHRLHMAMYFFLRHLSFLDLCLISATVPKSILNSVASTDSISFLGCVLQLFLVVLLAGSEIGILTAMSYDRYAAICCPLHCEAVMSRGLCVQLMALSWLNRGALGLLYTAGTFSLNFYGSDELHQFFCDVPALLKLTCSKEHAIISVSVAIGVCYAFSCLVCIVVSYVYIFSAVLRISQRQRQSKAFSNCVPHLIVVTVFLVTGAVAYLKPGSDTPSILDLLVSVFYSVAPPTLNPVIYCLKNKDIKSALSKVLWNVRSSGVMKDDLE

SEQ ID NO: 837 - DNA, 819 bp, Homo sapiens
  CDS (1)..(819)
ggatccatgattctggaccatcgtctccacatggcaatgtactttttcctccgacatttgtccttcttagacctgtgtctcatttctgccgcagtccccaaatccatcctcaactctgtcgcctccactgactccatctccttcctggggtgtgtgttgcagctcttcttggtggtactgctggctggatcagagattggcatccttactgccatgtcctatgaccgctatgctgccatctgctgccccctacactgtgaggctgtcatgagcagagggctctgtgtccagttgatggctctgtcctggctcaacagaggggccttgggactcttgtacacagctggaacattctctctgaatttttatggctctgatgagctacatcagttcttctgcgatgtccctgccctactaaagctcacttgttctaaagaacatgccatcattagtgtcagtgtggccattggggtctgttatgcattttcatgtttagtttgcattgtagtttcctatgtgtacattttctctgctgtgttaaggatatcacagagacagagacaatccaaagccttttccaactgtgtgcctcacctcattgttgtcactgtgtttcttgtaacaggtgctgttgcttatttaaagccagggtctgatgcaccttctattctagacttgctggtgtctgtgttctattctgtcgcacctccaaccttgaaccctgttatctactgtctgaagaacaaggacattaaatccgctctgagtaaagtcctgtggaatgttagaagcagtggggtaatgaaagatgacctcgag

SEQ ID NO: 838 - protein, 273 aa, Homo sapiens
GSMILDHRLHMAMYFFLRHLSFLDLCLISAAVPKSILNSVASTDSISFLGCVLQLFLVVLLAGSEIGILTAMSYDRYAAICCPLHCEAVMSRGLCVQLMALSWLNRGALGLLYTAGTFSLNFYGSDELHQFFCDVPALLKLTCSKEHAIISVSVAIGVCYAFSCLVCIVVSYVYIFSAVLRISQRQRQSKAFSNCVPHLIVVTVFLVTGAVAYLKPGSDAPSILDLLVSVFYSVAPPTLNPVIYCLKNKDIKSALSKVLWNVRSSGVMKDDLE

SEQ ID NO: 839 - DNA, 819 bp, Homo sapiens
  CDS (1)..(819)
ggatccatgattctggaccatcgtctccacatggcaatgtactttttcctccgacatttgtccttcttagacctgtgtctcatttctgccacagtccccaaatccatcctcaactctgtcgcctccactgactccatctccttcctggggtgtgtgttgcagctcttcttggtggtactgccggctggatcagagattggcatccttactgccatgtcctatgaccgctatgctgccatctgctgccccctacactgtgaggctgtcatgagcagagggctctgtgtccagttgatggctctgtcctggctcaacagaggggccttgggactcttgtacacagctggaacattctctctgaatttttatggctctgatgagctacatcagttcttctgcgatgtccctgccctactaaagctcacttgttctaaagaacatgccatcattagtgtcagtggggccattggggtctgttatgcattttcatgtttagtttgcattgtagtttcctatgtgtacattttctctgctgtgttaaggatatcacagagacagagacaatccaaagccttttccaactgtgtgcctcacctcattgttgtcactgtgtttcttgtaacaggtgctgttgcttatttaaagccagggtctgatgcaccttctattctagacttgctggtgtctgtgttctattctgtcgcacctccaaccttgaaccctgttatctactgtctgaagaacaaggacattaaatccgctctgagtaaagtcctgtggaatgttagaagcagtggggtaatgaaagatgacctcgag

SEQ ID NO: 840 - protein, 273 aa, Homo sapiens
GSMILDHRLHMAMYFFLRHLSFLDLCLISATVPKSILNSVASTDSISFLGCVLQLFLVVLPAGSEIGILTAMSYDRYAAICCPLHCEAVMSRGLCVQLMALSWLNRGALGLLYTAGTFSLNFYGSDELHQFFCDVPALLKLTCSKEHAIISVSGAIGVCYAFSCLVCIVVSYVYIFSAVLRISQRQRQSKAFSNCVPHLIVVTVFLVTGAVAYLKPGSDAPSILDLLVSVFYSVAPPTLNPVIYCLKNKDIKSALSKVLWNVRSSGVMKDDLE

SEQ ID NO: 841 - DNA, 960 bp, Homo sapiens
  CDS (1)..(960)
ggatccaccatgaccaatcagacacagatgatggaattcttgcttgtgagatttactgagaattgggtgctcctgaggctgcatgctttgctcttctcactgatctacctcacggctgtgctgatgaatttagtcatcattctcctcatgattctggaccatcgtctccacatggcaatgtactttttcctccgacatttgtccttcttagacctgtgtctcatttctgccacagtccccaaatccatcctcaactctgtcgcctccactgactccatctccttcctggggtgtgtgttgcagctcttcttggtggtactgctggctggatcagagattggcatccctactgccatgtcctatgaccgctatgctgccatctgctgccccctacactgtaaggctgtcatgagcagagggctctgtgtccagttgatggctctgtcctggctcaacagaggggccttgggactcttgtacacagctggaacattctctctgaatttttatggctctgatgagctacatcagttcttctgcgatgtccctgccctactaaagctcacttgttctaaagaacatgccatcattagtgtcagtgtggccattggggtctgttatgcattttcatgtttagtttgcattgtagtttcctatgtgtacattttctctgctgtgttaaggatatcacagagacagagacaatccaaagccttttccaactgtgtgcctcacctcattgttgtcactgtgtttcttgtaacaggtgctgttgcttatttaaagccagggtctgatgcaccttctattctagacttgctggtgtctgtgttctattctgtcgcacctccaaccttgaaccctgttatctactgtctgaagaacaaggacattaaatccgctctgagtaaagtcctgtggaatgttagaagcagtggggtaatgaaagatgacctcgag

SEQ ID NO: 842 - protein, 320 aa, Homo sapiens
GSTMTNQTQMMEFLLVRFTENWVLLRLHALLFSLIYLTAVLMNLVIILLMILDHRLHMAMYFFLRHLSFLDLCLISATVPKSILNSVASTDSISFLGCVLQLFLVVLLAGSEIGIPTAMSYDRYAAICCPLHCKAVMSRGLCVQLMALSWLNRGALGLLYTAGTFSLNFYGSDELHQFFCDVPALLKLTCSKEHAIISVSVAIGVCYAFSCLVCIVVSYVYIFSAVLRISQRQRQSKAFSNCVPHLIVVTVFLVTGAVAYLKPGSDAPSILDLLVSVFYSVAPPTLNPVIYCLKNKDIKSALSKVLWNVRSSGVMKDDLE

SEQ ID NO: 843 - DNA, 820 bp, Homo sapiens
  CDS (296)..(820)
ggatccatgattctggaccatcgtctccacatggcaatgtactttttcctccgacatttgtccttcttagacctgtgtctcatttctgccacagtccccaaatccatcctcaactctgtcgcctccactgactccatctccttcctggggtgtgtgttgcagctcttcttggtggtactgctggctggatcagagattggcatccttactgccatgtcctatgaccgctatgctgccatctgctgccccctacactgtgaggctgtcatgagcagagggctctgtgtccagttgatggctctgtcctggctcaacagaggggccttgggactcttgtacacagctggaacattctcttctgaatttttatggctctgatgagctacatcagttcttctgcgatgtccctgccctactaaagctcacttgttctaaagaacatgccatcattagtgtcagtgtggccattggggtctgttatgcattttcatgtttagtttgcattgtagtttcctatgtgtacattttctctgctgtgttaaggatatcacagagacagagacaatccaaagccttttccaactgtgtgcctcacctcattgttgtcactgtgtttcttgtaacaggtgctgttgcttatttaaagccagggtctgatgcaccttctattctagacttgctggtgtctgtgttctattctgtcgcacctccaaccttgaaccctgttatctactgtctgaagaacaaggacattaaatccgctctgagtaaagtcctgtggaatgttagaagcagtggggtaatgaaagatgacctcgag

SEQ ID NO: 844 - protein, 175 aa, Homo sapiens
WLCPGSTEGPWDSCTQLEHSLLNFYGSDELHQFFCDVPALLKLTCSKEHAIISVSVAIGVCYAFSCLVCIVVSYVYIFSAVLRISQRQRQSKAFSNCVPHLIVVTVFLVTGAVAYLKPGSDAPSILDLLVSVFYSVAPPTLNPVIYCLKNKDIKSALSKVLWNVRSSGVMKDDLE

SEQ ID NO: 845 - DNA, 945 bp, Homo sapiens
  CDS (1)..(945)
atgaccaatcagacacagatgatggaattcttgcttgtgagatttactgagaattgggtgctcctgaggctgcatgctttgctcttctcactgatctacctcacggctgtgctgatgaatttagtcatcattctcctcatgattctggaccatcgtctccacatggcaatgtactttttcctccgacatttgtccttcttagacctgtgtctcatttctgccacagtccccaaatccatcctcaactctgtcgcctccactgactccatctccttcctggggtgtgtgttgcagctcttcttggtggtactgctggctggatcagagattggcatccttactgccatgtcctatgaccgctatgctgccatctgctgccccctacactgtgaggctgtcatgagcagagggctctgtgtccagttgatggctctgtcctggctcaacagaggggccttgggactcttgtacacagctggaacattctctctgaatttttatggctctgatgagctacatcagttcttctgcgatgtccctgccctactaaagctcacttgttctaaagaacatgccatcattagtgtcagtgtggccattggggtctgttatgcattttcatgtttagtttgcattgtagtttcctatgtgtacattttctctgctgtgttaaggatatcacagagacagagacaatccaaagccttttccaactgtgtgcctcacctcattgttgtcactgtgtttcttgtaacaggtgctgttgcttatttaaagccagggtctgatgcaccttctattctagacttgctggtgtctgtgttctattctgtcgcacctccaaccttgaaccctgttatctactgtctgaagaacaaggacattaaatccgctctgagtaaagtcctgtggaatgttagaagcagtggggtaatgaaagatgac

SEQ ID NO: 846 - protein, 315 aa, Homo sapiens; identical to SEQ ID NO: 134

SEQ ID NO: 847 - DNA, 952 bp, Homo sapiens
  CDS (3)..(941)
ccaatcagacacagatgatggaattcttgcttgtgagatttactgagaattgggtgctcctgaggctgcatgctttgctcttctcactgatctacctcacggctgtgctgatgaatttagtcatcattctcctcatgattctggaccatcgtctccacatggcaatgtactttttcctccgacatttgtccttcttagacctgtgtctcatttctgccacagtccccaaatccatcctcaactctgtcgcctccactgactccatctccttcctggggtgtgtgttgcagctcttcttggtggtactgctggctggatcagagattggcatccttactgccatgtcctatgaccgctatgctgccatctgctgccccctacactgtgaggctgtcatgagcagagggctctgtgtccagttgatggctctgtcctggctcaacagaggggccttgggactcttgtacacagctggaacattctctctgaatttttatggctctgatgagctacatcagttcttctgcgatgtccctgccctactaaagctcacttgttctaaagaacatgccatcattagtgtcagtgtggccattggggtctgttatgcattttcatgtttagtttgcattgtagtttcctatgtgtacattttctctgctgtgttaaggatatcacagagacagagacaatccaaagccttttccaactgtgtgcctcacctcattgttgtcactgtgtttcttgtaacaggtgctgttgcttatttaaagccagggtctgatgcaccttctattctagacttgctggtgtctgtgttctattctgtcgcacctccaaccttgaaccctgttatctactgtctgaagaacaaggacattaaatccgctctgagtaaagtcctgtggaatgttagaagcagtggggtaatgaaagatgactagcaattggg

SEQ ID NO: 848 - protein, 313 aa, Homo sapiens
NQTQMMEFLLVRFTENWVLLRLHALLFSLIYLTAVLMNLVIILLMILDHRLHMAMYFFLRHLSFLDLCLISATVPKSILNSVASTDSISFLGCVLQLFLVVLLAGSEIGILTAMSYDRYAAICCPLHCEAVMSRGLCVQLMALSWLNRGALGLLYTAGTFSLNFYGSDELHQFFCDVPALLKLTCSKEHAIISVSVAIGVCYAFSCLVCIVVSYVYIFSAVLRISQRQRQSKAFSNCVPHLIVVTVFLVTGAVAYLKPGSDAPSILDLLVSVFYSVAPPTLNPVIYCLKNKDIKSALSKVLWNVRSSGVMKDD

SEQ ID NO: 849 - DNA, 60 bp, Homo sapiens
  CDS (1)..(60)
atgatggaattcttgcttgtgagatttactgagaattgggtgctcctgaggctgcatgct

SEQ ID NO: 850 - protein, 20 aa, Homo sapiens
MMEFLLVRFTENWVLLRLHA

SEQ ID NO: 851 - DNA, 60 bp, Homo sapiens
  CDS (1)..(60)
gatgtccctgccctactaaagctcacttgttctaaagaacatgccatcattagtgtcagt

SEQ ID NO: 852 - protein, 20 aa, Homo sapiens
DVPALLKLTCSKEHAIISVS

SEQ ID NO: 853 - DNA, 952 bp, Homo sapiens; identical to SEQ ID NO: 847
  CDS (3)..(941)

SEQ ID NO: 854 - protein, 313 aa, Homo sapiens; identical to SEQ ID NO: 848

SEQ ID NO: 855 - DNA, 2828 bp, Homo sapiens
  CDS (63)..(2825)
gtctctggcctatcaggaggacaactggtgctgcaatagaagccagtggctaagtctcgtgtatggcgtggttaaggttgcagcctctcacctctgccttcctccattttgggctggttacctttgtgctcttcctgaatggtcttcgagcagaggctggtggctcaggggacgtgccaagcacagggcagaacaatgagtcctgttcagggtcatcggactgcaaggagggtgtcatcctgccaatctggtacccggagaacccttcccttggggacaagattgccagggtcattgtctattttgtggccctgatatacatgttccttggggtgtccatcattgctgaccgcttcatggcatctattgaagtcatcacctctcaagagagggaggtgacaattaagaaacccaatggagaaaccagcacaaccactattcgggtctggaatgaaactgtctccaacctgacccttatggccctgggttcctctgctcctgagatactcctctctttaattgaggtgtgtggtcatgggttcattgctggtgatctgggaccttctaccattgtagggagtgcagccttcaacatgttcatcatcattggcatctgtgtctacgtgatcccagacggagagactcgcaagatcaaacatctacgagtcttcttcatcaccgctgcttggagtatctttgcctacatctggctctatatgattctggcagtcttctcccctggtgtggtccaggtttgggaaggcctcctcactctcttcttctttccagtgtgtgtccttctggcctgggtggcagataaacgactgctcttctacaaatacatgcacaaaaagtaccgcacagacaaacaccgaggaattatcatagagacagagggtgaccaccctaagggcattgagatggatgggaaaatgatgaattcccattttctagatgggaacctggtgcccctggaagggaaggaagtggatgagtcccgcagagagatgatccggattctcaaggatctgaagcaaaaacacccagagaaggacttagatcagctggtggagatggccaattactatgctctttcccaccaacagaagagccgcgccttctaccgtatccaagccactcgtatgatgactggtgcaggcaatatcctgaagaaacatgcagcagaacaagccaagaaggcctccagcatgagcgaggtgcacaccgatgagcctgaggactttatttccaaggtcttctttgacccatgttcttaccagtgcctggagaactgtggggctgtactcctgacagtggtgaggaaagggggagacatgtcaaagaccatgtatgtggactacaaaacagaggatggttctgccaatgcaggggctgactatgagttcacagagggcacggtggttctgaagccaggagagacccagaaggagttctccgtgggcataattgatgacgacatttttgaggaggatgaacacttctttgtaaggttgagcaatgtccgcatagaggaggagcagccagaggaggggatgcctccagcaatattcaacagtcttcccttgcctcgggctgtcctagcctccccttgtgtggccacagttaccatcttggatgatgaccatgcaggcatcttcacttttgaatgtgatactattcatgtcagtgagagtattggtgttatggaggtcaaggttctgcggacatcaggtgcccggggtacagtcatcgtcccctttaggacagtagaagggacagccaagggtggcggtgaggactttgaagacacatatggggagttggaattcaagaatgatgaaactgtgaaaaccataagggttaaaatagtagatgaggaggaatacgaaaggcaagagaatttcttcattgcccttggtgaaccgaaatggatggaacgtggaatatcagatgtgacagacaggaagctgactatggaagaagaggaggccaagaggatagcagagatgggaaagccagtattgggtgaacaccccaaactagaagtcatcattgaagagtcctatgagttcaagactacggtggacaaactgatcaagaagacaaacctggccttggttgtggggacccattcctggagggaccagttcatggaggccatcaccgtcagtgcagcaggggatgaggatgaggatgaatccggggaggagaggctgccctcctgctttgactacgtcatgcacttcctgactgtcttctggaaggtgctgtttgcctgtgtgccccccacagagtactgccacggctgggcctgcttcgccgtctccatcctcatcattggcatgctcaccgccatcattggggacctggcctcgcacttcggctgcaccattggtctcaaagattcagtcacagctgttgttttcgtggcatttggcacctctgtcccagatacgtttgccagcaaagctgctgccctccaggatgtatatgcagacgcctccattggcaacgtgacgggcagcaacgccgtcaatgtcttcctgggcatcggcctggcctggtccgtggccgccatctactgggctctgcagggacaggagttccacgtgtcggccggcacactggccttctccgtcaccctcttcaccatctttgcatttgtctgcatcagcgtgctcttgtaccgaaggcggccgcacctgggaggggagcttggtggcccccgtggctgcaagctcgccacaacatggctctttgtgagcctgtggctcctctacatactctttgccacactagaggcctattgctacatcaaggggttctaa

SEQ ID NO: 856 - protein, 921 aa, Homo sapiens
MAWLRLQPLTSAFLHFGLVTFVLFLNGLRAEAGGSGDVPSTGQNNESCSGSSDCKEGVILPIWYPENPSLGDKIARVIVYFVALIYMFLGVSIIADRFMASIEVITSQEREVTIKKPNGETSTTTIRVWNETVSNLTLMALGSSAPEILLSLIEVCGHGFIAGDLGPSTIVGSAAFNMFIIIGICVYVIPDGETRKIKHLRVFFITAAWSIFAYIWLYMILAVFSPGVVQVWEGLLTLFFFPVCVLLAWVADKRLLFYKYMHKKYRTDKHRGIIIETEGDHPKGIEMDGKMMNSHFLDGNLVPLEGKEVDESRREMIRILKDLKQKHPEKDLDQLVEMANYYALSHQQKSRAFYRIQATRMMTGAGNILKKHAAEQAKKASSMSEVHTDEPEDFISKVFFDPCSYQCLENCGAVLLTVVRKGGDMSKTMYVDYKTEDGSANAGADYEFTEGTVVLKPGETQKEFSVGIIDDDIFEEDEHFFVRLSNVRIEEEQPEEGMPPAIFNSLPLPRAVLASPCVATVTILDDDHAGIFTFECDTIHVSESIGVMEVKVLRTSGARGTVIVPFRTVEGTAKGGGEDFEDTYGELEFKNDETVKTIRVKIVDEEEYERQENFFIALGEPKWMERGISDVTDRKLTMEEEEAKRIAEMGKPVLGEHPKLEVIIEESYEFKTTVDKLIKKTNLALVVGTHSWRDQFMEAITVSAAGDEDEDESGEERLPSCFDYVMHFLTVFWKVLFACVPPTEYCHGWACFAVSILIIGMLTAIIGDLASHFGCTIGLKDSVTAVVFVAFGTSVPDTFASKAAALQDVYADASIGNVTGSNAVNVFLGIGLAWSVAAIYWALQGQEFHVSAGTLAFSVTLFTIFAFVCISVLLYRRRPHLGGELGGPRGCKLATTWLFVSLWLLYILFATLEAYCYIKGF

SEQ ID NO: 857 - DNA, 2840 bp, Homo sapiens
  CDS (63)..(2837)
gtctctggcctatcaggaggacaactggtgctgcaatagaagccagtggctaagtctcgtgtatggcgtggttaaggttgcagcctctcacctctgccttcctccattttgggctggttacctttgtgctcttcctgaatggtcttcgagcagaggctggtggctcaggggacgtgccaagcacagggcagaacaatgagtcctgttcagggtcatcggactgcaaggagggtgtcatcctgccaatctggtacccggagaacccttcccttggggacaagattgccagggtcattgtctattttgtggccctgatatacatgttccttggggtgtccatcattgctgaccgcttcatggcatctattgaagtcatcacctctcaagagagggaggtgacaattaagaaacccaatggagaaaccagcacaaccactattcgggtctggaatgaaactgtctccaacctgacccttatggccctgggttcctctgctcctgagatactcctctctttaattgaggtgtgtggtcatgggttcattgctggtgatctgggaccttctaccattgtagggagtgcagccttcaacatgttcatcatcattggcatctgtgtctacgtgatcccagacggagagactcgcaagatcaagcatctacgagtcttcttcatcaccgctgcttggagtatctttgcctacatctggctctatatgattctggcagtcttctcccctggtgtggtccaggtttgggaaggcctcctcactctcttcttctttccagtgtgtgtccttctggcctgggtggcagataaacgactgctcttctacaaatacatgcacaaaaagtaccgcacagacaaacaccgaggaattatcatagagacagagggtgaccaccctaagggcattgagatggatgggaaaatgatgaattcccattttctagatgggaacctggtgcccctggaagggaaggaagtggatgagtcccgcagagagatgatccggattctcaaggatctgaagcaaaaacacccagagaaggacttagatcagctggtggagatggccaattactatgctctttcccaccaacagaagagccgtgccttctaccgtatccaagccactcgtatgatgactggtgcaggcaatatcctgaagaaacatgcagcagaacaagccaagaaggcctccagcatgagcgaggtgcacaccgatgagcctgaggactttatttccaaggtcttctttgacccatgttcttaccagtgcctggagaactgtggggctgtactcctgacagtggtgaggaaagggggagacatgtcaaagaccatgtatgtggactacaaaacagaggatggttctgccaatgcaggggctgactatgagttcacagagggcacggtggttctgaagccaggagagacccagaaggagttctccgtgggcataattgatgacgacatttttgaggaggatgaacacttctttgtaaggttgagcaatgtccgcatagaggaggagcagccagaggaggggatgcctccagcaatattcaacagtcttcccttgcctcgggctgtcctagcctccccttgtgtggccacagttaccatcttggatgatgaccatgcaggcatcttcacttttgaatgtgatactattcatgtcagtgagagtattggtgttatggaggtcaaggttctgcggacatcaggtgcccggggtacagtcatcgtcccctttaggacagtagaagggacagccaagggtggcggtgaggactttgaagacacatatggggagttggaattcaagaatgatgaaactgtcaaaacaattcacatcaaggtaattgatgatgaggcatatgagaaaaacaagaattacttcattgagatgatgggcccccgcatggtggatatgagttttcagaaagcgctcctgttatctccagacaggaagctgactatggaagaagaggaggccaagaggatagcagagatgggaaagccagtattgggtgaacaccccaaactagaagtcatcattgaagagtcctatgagttcaagactacggtggacaaactgatcaagaagacaaacctggccttggttgtggggacccattcctggagggaccagttcatggaggccatcaccgtcagtgcagcaggggatgaggatgaggatgaatccggggaggagaggctgccctcctgctttgactacgtcatgcacttcctgactgtcttctggaaggtgctgtttgcctgtgtgccccccacagagtactgccacggctgggcctgcttcgccgtctccatcctcatcattggcatgctcaccgccatcattggggacctggcctcgcacttcggctgcaccattggtctcaaagattcagtcacagctgttgttttcgtggcatttggcacctctgtcccagatacgtttgccagcaaagctgctgccctccaggatgtatatgcagacgcctccattggcaacgtgacgggcagcaacgccgtcaatgtcttcctgggcatcggcctggcctggtccgtggccgccatctactgggctctgcagggacaggagttccacgtgtcggccggcacactggccttctccgtcaccctcttcaccatctttgcatttgtctgcatcagcgtgctcttgtaccgaaggcggccgcacctgggaggggagcttggtggcccccgtggctgcaagctcgccacaacatggctctttgtgagcctgtggctcctctacatactctttgccacactagaggcctattgctacatcaaggggttctaa

SEQ ID NO: 858 - protein, 925 aa, Homo sapiens
MAWLRLQPLTSAFLHFGLVTFVLFLNGLRAEAGGSGDVPSTGQNNESCSGSSDCKEGVILPIWYPENPSLGDKIARVIVYFVALIYMFLGVSIIADRFMASIEVITSQEREVTIKKPNGETSTTTIRVWNETVSNLTLMALGSSAPEILLSLIEVCGHGFIAGDLGPSTIVGSAAFNMFIIIGICVYVIPDGETRKIKHLRVFFITAAWSIFAYIWLYMILAVFSPGVVQVWEGLLTLFFFPVCVLLAWVADKRLLFYKYMHKKYRTDKHRGIIIETEGDHPKGIEMDGKMMNSHFLDGNLVPLEGKEVDESRREMIRILKDLKQKHPEKDLDQLVEMANYYALSHQQKSRAFYRIQATRMMTGAGNILKKHAAEQAKKASSMSEVHTDEPEDFISKVFFDPCSYQCLENCGAVLLTVVRKGGDMSKTMYVDYKTEDGSANAGADYEFTEGTVVLKPGETQKEFSVGIIDDDIFEEDEHFFVRLSNVRIEEEQPEEGMPPAIFNSLPLPRAVLASPCVATVTILDDDHAGIFTFECDTIHVSESIGVMEVKVLRTSGARGTVIVPFRTVEGTAKGGGEDFEDTYGELEFKNDETVKTIHIKVIDDEAYEKNKNYFIEMMGPRMVDMSFQKALLLSPDRKLTMEEEEAKRIAEMGKPVLGEHPKLEVIIEESYEFKTTVDKLIKKTNLALVVGTHSWRDQFMEAITVSAAGDEDEDESGEERLPSCFDYVMHFLTVFWKVLFACVPPTEYCHGWACFAVSILIIGMLTAIIGDLASHFGCTIGLKDSVTAVVFVAFGTSVPDTFASKAAALQDVYADASIGNVTGSNAVNVFLGIGLAWSVAAIYWALQGQEFHVSAGTLAFSVTLFTIFAFVCISVLLYRRRPHLGGELGGPRGCKLATTWLFVSLWLLYILFATLEAYCYIKGF

SEQ ID NO: 859 - DNA, 2778 bp, Homo sapiens
  CDS (1)..(2778)
ggatccaccatggcgtggttaaggttgcagcctctcacctctgccttcctccattttgggctggttacctttgtgctcttcctgaatggtcttcgagcagaggctggtggctcaggggacgtgccaagcacagggcagaacaatgagtcctgttcagggtcatcggactgcaaggagggtgtcatcctgccaatctggtacccggagaacccttcccttggggacaagattgccagggtcattgtctattttgtggccctgatatacatgttccttggggtgtccatcattgctgaccgcttcatggcatctattgaagtcatcacctctcaagagagggaggtgacaattaagaaacccaatggagaaaccagcacaaccactattcgggtctggaatgaaactgtctccaacctgacccttatggccctgggttcctctgctcctgagatactcctctctttaattgaggtgtgtggtcatgggttcattgctggtgatctgggaccttctaccattgtagggagtgcagccttcaacatgttcatcatcattggcatctgtgtctacgtgatcccagacggagagactcgcaagatcaagcatctacgagtcttcttcatcaccgctgcttggagtatctttgcctacatctggctctatatgattctggcagtcttctcccctggtgtggtccaggtttgggaaggcctcctcactctcttcttctttccagtgtgtgtccttctggcctgggtggcagataaacgactgctcttctacaaatacatgcacaaaaagtaccgcacagacaaacaccgaggaattatcatagagacagagggtgaccaccctaagggcattgagatggatgggaaaatgatgaattcccattttctagatgggaacctggtgcccctggaagggaaggaagtggatgagtcccgcagagagatgatccggattctcaaggatctgaagcaaaaacacccagagaaggacttagatcagctggtggagatggccaattactatgctctttcccaccaacagaagagccgcgccttctaccgtatccaagccactcgtatgatgactggtgcaggcaatatcctgaagaaacatgcagcagaacaagccaagaaggcctccagcatgagcgaggtgcacaccgatgagcctgaggactttatttccaaggtcttctttgacccatgttcttaccagtgcctggagaactgtggggctgtactcctgacagtggtgaggaaagggggagacatgtcaaagaccatgtatgtggactacaaaacagaggatggttctgccaatgcaggggctgactatgagttcacagagggcacggtggttctgaagccaggagagacccagaaggagttctccgtgggcataattgatgacgacatttttgaggaggatgaacacttctttgtaaggttgagcaatgtccgcatagaggaggagcagccagaggaggggatgcctccagcaatattcaacagtcttcccttgcctcgggctgtcctagcctccccttgtgtggccacagttaccatcttggatgatgaccatgcaggcatcttcacttttgaatgtgatactattcatgtcagtgagagtattggtgttatggaggtcaaggttctgcggacatcaggtgcccggggtacagtcatcgtcccctttaggacagtagaagggacagccaagggtggcggtgaggactttgaagacacatatggggagttggaattcaagaatgatgaaactgtgaaaaccataagggttaaaatagtagatgaggaggaatacgaaaggcaagagaatttcttcattgcccttggtgaaccgaaatggatggaacgtggaatatcagatgtgacagacaggaagctgactatggaagaagaggaggccaagaggatagcagagatgggaaagccagtattgggtgaacaccccaaactagaagtcatcattgaagagtcctatgagttcaagactacggtggacaaactgatcaagaagacaaacctggccttggttgtggggacccattcctggagggaccagttcatggaggccatcaccgtcagtgcagcaggggatgaggatgaggatgaatccggggaggagaggctgccctcctgctttgactacgtcatgcacttcctgactgtcttctggaaggtgctgtttgcctgtgtgccccccacagagtactgccacggctgggcctgcttcgccgtctccatcctcatcattggcatgctcaccgccatcattggggacctggcctcgcacttcggctgcaccattggtctcaaagattcagtcacagctgttgttttcgtggcatttggcacctctgtcccagatacgtttgccagcaaagctgctgccctccaggatgtatatgcagacgcctccattggcaacgtgacgggcagcaacgccgtcaatgtcttcctgggcatcggcctggcctggtccgtggccgccatctactgggctctgcagggacaggagttccacgtgtcggccggcacactggccttctccgtcaccctcttcaccatctttgcatttgtctgcatcagcgtgctcttgtaccgaaggcggccgcacctgggaggggagcttggtggcccccgtggctgcaagctcgccacaacatggctctttgtgagcctgtggctcctctacatactctttgccacactagaggcctattgctacatcaaggggttcctcgag

SEQ ID NO: 860 - protein, 926 aa, Homo sapiens
GSTMAWLRLQPLTSAFLHFGLVTFVLFLNGLRAEAGGSGDVPSTGQNNESCSGSSDCKEGVILPIWYPENPSLGDKIARVIVYFVALIYMFLGVSIIADRFMASIEVITSQEREVTIKKPNGETSTTTIRVWNETVSNLTLMALGSSAPEILLSLIEVCGHGFIAGDLGPSTIVGSAAFNMFIIIGICVYVIPDGETRKIKHLRVFFITAAWSIFAYIWLYMILAVFSPGVVQVWEGLLTLFFFPVCVLLAWVADKRLLFYKYMHKKYRTDKHRGIIIETEGDHPKGIEMDGKMMNSHFLDGNLVPLEGKEVDESRREMIRILKDLKQKHPEKDLDQLVEMANYYALSHQQKSRAFYRIQATRMMTGAGNILKKHAAEQAKKASSMSEVHTDEPEDFISKVFFDPCSYQCLENCGAVLLTVVRKGGDMSKTMYVDYKTEDGSANAGADYEFTEGTVVLKPGETQKEFSVGIIDDDIFEEDEHFFVRLSNVRIEEEQPEEGMPPAIFNSLPLPRAVLASPCVATVTILDDDHAGIFTFECDTIHVSESIGVMEVKVLRTSGARGTVIVPFRTVEGTAKGGGEDFEDTYGELEFKNDETVKTIRVKIVDEEEYERQENFFIALGEPKWMERGISDVTDRKLTMEEEEAKRIAEMGKPVLGEHPKLEVIIEESYEFKTTVDKLIKKTNLALVVGTHSWRDQFMEAITVSAAGDEDEDESGEERLPSCFDYVMHFLTVFWKVLFACVPPTEYCHGWACFAVSILIIGMLTAIIGDLASHFGCTIGLKDSVTAVVFVAFGTSVPDTFASKAAALQDVYADASIGNVTGSNAVNVFLGIGLAWSVAAIYWALQGQEFHVSAGTLAFSVTLFTIFAFVCISVLLYRRRPHLGGELGGPRGCKLATTWLFVSLWLLYILFATLEAYCYIKGFLE

SEQ ID NO: 861 - DNA, 2685 bp, Homo sapiens
  CDS (1)..(2685)
ggatccgaggctggtggctcaggggacgtgccaagcacagggcagaacaatgagtcctgttcagggtcatcggactgcaaggagggtgtcatcctgccaatctggtacccggagaacccttcccttggggacaagattgccagggtcattgtctattttgtggccctgatatacatgttccttggggtgtccatcattgctgaccgcttcatggcatctattgaagtcatcacctctcaagagagggaggtgacaattaagaaacccaatggagaaaccagcacaaccactattcgggtctggaatgaaactgtctccaacctgacccttatggccctgggttcctctgctcctgagatactcctctctttaattgaggtgtgtggtcatgggttcattgctggtgatctgggaccttctaccattgtagggagtgcagccttcaacatgttcatcatcattggcatctgtgtctacgtgatcccagacggagagactcgcaagatcaaacatctacgagtcttcttcatcaccgctgcttggagtatctttgcctacatctggctctatatgattctggcagtcttctcccctggtgtggtccaggtttgggaaggcctcctcactctcttcttctttccagtgtgtgtccttctggcctgggtggcagataaacgactgctcttctacaaatacatgcacaaaaagtaccgcacagacaaacaccgaggaattatcatagagacagagggtgaccaccctaagggcattgagatggatgggaaaatgatgaattcccattttctagatgggaacctggtgcccctggaagggaaggaagtggatgagtcccgcagagagatgatccggattctcaaggatctgaagcaaaaacacccagagaaggacttagatcagctggtggagatggccaattactatgctctttcccaccaacagaagagccgcgccttctaccgtatccaagccactcgtatgatgactggtgcaggcaatatcctgaagaaacatgcagcagaacaagccaagaaggcctccagcatgagcgaggtgcacaccgatgagcctgaggactttatttccaaggtcttctttgacccatgttcttaccagtgcctggagaactgtggggctgtactcctgacagtggtgaggaaagggggagacatgtcaaagaccatgtatgtggactacaaaacagaggatggttctgccaatgcaggggctgactatgagttcacagagggcacggtggttctgaagccaggagagacccagaaggagttctccgtgggcataattgatgacgacatttttgaggaggatgaacacttctttgtaaggttgagcaatgtccgcatagaggaggagcagccagaggaggggatgcctccagcaatattcaacagtcttcccttgcctcgggctgtcctagcctccccttgtgtggccacagttaccatcttggatgatgaccatgcaggcatcttcacttttgaatgtgatactattcatgtcagtgagagtattggtgttatggaggtcaaggttctgcggacatcaggtgcccggggtacagtcatcgtcccctttaggacagtagaagggacagccaagggtggcggtgaggactttgaagacacatatggggagttggaattcaagaatgatgaaactgtgaaaaccataagggttaaaatagtagatgaggaggaatacgaaaggcaagagaatttcttcattgcccttggtgaaccgaaatggatggaacgtggaatatcagatgtgacagacaggaagctgactatggaagaagaggaggccaagaggatagcagagatgggaaagccagtattgggtgaacaccccaaactagaagtcatcattgaagagtcctatgagttcaagactacggtggacaaactgatcaagaagacaaacctggccttggttgtggggacccattcctggagggaccagttcatggaggccatcaccgtcagtgcagcaggggatgaggatgaggatgaatccggggaggagaggctgccctcctgctttgactacgtcatgcacttcctgactgtcttctggaaggtgctgtttgcctgtgtgccccccacagagtactgccacggctgggcctgcttcgccgtctccatcctcatcattggcatgctcaccgccatcattggggacctggcctcgcacttcggctgcaccattggtctcaaagattcagtcacagctgttgttttcgtggcatttggcacctctgtcccagatacgtttgccagcaaagctgctgccctccaggatgtatatgcagacgcctccattggcaacgtgacgggcagcaacgccgtcaatgtcttcctgggcatcggcctggcctggtccgtggccgccatctactgggctctgcagggacaggagttccacgtgtcggccggcacactggccttctccgtcaccctcttcaccatctttgcatttgtctgcatcagcgtgctcttgtaccgaaggcggccgcacctgggaggggagcttggtggcccccgtggctgcaagctcgccacaacatggctctttgtgagcctgtggctcctctacatactctttgccacactagaggcctattgctacatcaaggggttcctcgag

SEQ ID NO: 862 - protein, 895 aa, Homo sapiens
GSEAGGSGDVPSTGQNNESCSGSSDCKEGVILPIWYPENPSLGDKIARVIVYFVALIYMFLGVSIIADRFMASIEVITSQEREVTIKKPNGETSTTTIRVWNETVSNLTLMALGSSAPEILLSLIEVCGHGFIAGDLGPSTIVGSAAFNMFIIIGICVYVIPDGETRKIKHLRVFFITAAWSIFAYIWLYMILAVFSPGVVQVWEGLLTLFFFPVCVLLAWVADKRLLFYKYMHKKYRTDKHRGIIIETEGDHPKGIEMDGKMMNSHFLDGNLVPLEGKEVDESRREMIRILKDLKQKHPEKDLDQLVEMANYYALSHQQKSRAFYRIQATRMMTGAGNILKKHAAEQAKKASSMSEVHTDEPEDFISKVFFDPCSYQCLENCGAVLLTVVRKGGDMSKTMYVDYKTEDGSANAGADYEFTEGTVVLKPGETQKEFSVGIIDDDIFEEDEHFFVRLSNVRIEEEQPEEGMPPAIFNSLPLPRAVLASPCVATVTILDDDHAGIFTFECDTIHVSESIGVMEVKVLRTSGARGTVIVPFRTVEGTAKGGGEDFEDTYGELEFKNDETVKTIRVKIVDEEEYERQENFFIALGEPKWMERGISDVTDRKLTMEEEEAKRIAEMGKPVLGEHPKLEVIIEESYEFKTTVDKLIKKTNLALVVGTHSWRDQFMEAITVSAAGDEDEDESGEERLPSCFDYVMHFLTVFWKVLFACVPPTEYCHGWACFAVSILIIGMLTAIIGDLASHFGCTIGLKDSVTAVVFVAFGTSVPDTFASKAAALQDVYADASIGNVTGSNAVNVFLGIGLAWSVAAIYWALQGQEFHVSAGTLAFSVTLFTIFAFVCISVLLYRRRPHLGGELGGPRGCKLATTWLFVSLWLLYILFATLEAYCYIKGFLE

SEQ ID NO: 863 - DNA, 2813 bp, Homo sapiens
  CDS (9)..(2792)
tctcgtgtatggcgtggttaaggttgcagcctctcacctctgccttcctccattttgggctggttacctttgtgctcttcctgaatggtcttcgagcagaggctggtggctcaggggacgtgccaagcacagggcagaacaatgagtcctgttcagggtcatcggactgcaaggagggtgtcatcctgccaatctggtacccggagaacccttcccttggggacaagattgccagggtcattgtctattttgtggccctgatatacatgttccttggggtgtccatcattgctgaccgcttcatggcatctattgaagtcatcacctctcaagagagggaggtgacaattaagaaacccaatggagaaaccagcacaaccactattcgggtctggaatgaaactgtctccaacctgacccttatggccctgggttcctctgctcctgagatactcctctctttaattgaggtgtgtggtcatgggttcattgctggtgatctgggaccttctaccattgtagggagtgcagccttcaacatgttcatcatcattggcatctgtgtctacgtgatcccagacggagagactcgcaagatcaagcatctacgagtcttcttcatcaccgctgcttggagtatctttgcctacatctggctctatatgattctggcagtcttctcccctggtgtggtccaggtttgggaaggcctcctcactctcttcttctttccagtgtgtgtccttctggcctgggtggcagataaacgactgctcttctacaaatacatgcacaaaaagtaccgcacagacaaacaccgaggaattatcatagagacagagggtgaccaccctaagggcattgagatggatgggaaaatgatgaattcccattttctagatgggaacctggtgcccctggaagggaaggaagtggatgagtcccgcagagagatgatccggattctcaaggatctgaagcaaaaacacccagagaaggacttagatcagctggtggagatggccaattactatgctctttcccaccaacagaagagccgtgccttctaccgtatccaagccactcgtatgatgactggtgcaggcaatatcctgaagaaacatgcagcagaacaagccaagaaggcctccagcatgagcgaggtgcacaccgatgagcctgaggactttatttccaaggtcttctttgacccatgttcttaccagtgcctggagaactgtggggctgtactcctgacagtggtgaggaaagggggagacatgtcaaagaccatgtatgtggactacaaaacagaggatggttctgccaatgcaggggctgactatgagttcacagagggcacggtggttctgaagccaggagagacccagaaggagttctccgtgggcataattgatgacgacatttttgaggaggatgaacacttctttgtaaggttgagcaatgtccgcatagaggaggagcagccagaggaggggatgcctccagcaatattcaacagtcttcccttgcctcgggctgtcctagcctccccttgtgtggccacagttaccatcttggatgatgaccatgcaggcatcttcacttttgaatgtgatactattcatgtcagtgagagtattggtgttatggaggtcaaggttctgcggacatcaggtgcccggggtacagtcatcgtcccctttaggacagtagaagggacagccaagggtggcggtgaggactttgaagacacatatggggagttggaattcaagaatgatgaaactgtgaaaactcttcaggtgaagatagttgatgacgaggaatatgagaaaaaggataatttcttcattgagctgggccagccccagtggcttaagcgagggatttcagctctgctactcaatcaaggggatggggacaggaagctaacagccgaggaggaggaggctcggaggatagcagagatgggcaagccagttcttggggagaactgccggctggaggtcatcatcgaggagtcatatgattttaagaacacggtggataaactcatcaagaaaacgaacttggccttggtaattgggacccattcatggagggagcagtttttagaggcaattacggtgagcgcaggggacgaggaggaggaggaggacgggtcccgggaggagcggctgccgtcgtgctttgactacgtgatgcacttcctgacggtgttctggaaggtgctcttcgcctgtgtgccccccaccgagtactgccacggctgggcctgctttggtgtctccatcctggtcatcggcctgctcaccgccctcattggggacctcgcctcccacttcggctgcaccgttggcctcaaggactctgtcaatgctgttgtcttcgttgccctgggcacctccatccctgacacgttcgccagcaaggtggcggcgctgcaggaccagtgcgccgacgcgtccatcggcaacgtgaccggctccaacgcggtgaacgtgttccttggcctgggcgtcgcctggtctgtggccgccgtgtactgggcggtgcagggccgccccttcgaggtgcgcactggcacgctggccttctccgtcacgctcttcaccgtcttcgccttcgtgggcattgccgtgctgctgtaccggcgccggccgcacatcggcggcgagctgggcggcccgcgcggacccaagctcgccaccaccgcgctcttcctgggcctctggctcctgtacatcctcttcgccagcctggaggcgtactgccacatccggggcttctagggcctcgcgcagagactc

SEQ ID NO: 864 - protein, 928 aa, Homo sapiens
MAWLRLQPLTSAFLHFGLVTFVLFLNGLRAEAGGSGDVPSTGQNNESCSGSSDCKEGVILPIWYPENPSLGDKIARVIVYFVALIYMFLGVSIIADRFMASIEVITSQEREVTIKKPNGETSTTTIRVWNETVSNLTLMALGSSAPEILLSLIEVCGHGFIAGDLGPSTIVGSAAFNMFIIIGICVYVIPDGETRKIKHLRVFFITAAWSIFAYIWLYMILAVFSPGVVQVWEGLLTLFFFPVCVLLAWVADKRLLFYKYMHKKYRTDKHRGIIIETEGDHPKGIEMDGKMMNSHFLDGNLVPLEGKEVDESRREMIRILKDLKQKHPEKDLDQLVEMANYYALSHQQKSRAFYRIQATRMMTGAGNILKKHAAEQAKKASSMSEVHTDEPEDFISKVFFDPCSYQCLENCGAVLLTVVRKGGDMSKTMYVDYKTEDGSANAGADYEFTEGTVVLKPGETQKEFSVGIIDDDIFEEDEHFFVRLSNVRIEEEQPEEGMPPAIFNSLPLPRAVLASPCVATVTILDDDHAGIFTFECDTIHVSESIGVMEVKVLRTSGARGTVIVPFRTVEGTAKGGGEDFEDTYGELEFKNDETVKTLQVKIVDDEEYEKKDNFFIELGQPQWLKRGISALLLNQGDGDRKLTAEEEEARRIAEMGKPVLGENCRLEVIIEESYDFKNTVDKLIKKTNLALVIGTHSWREQFLEAITVSAGDEEEEEDGSREERLPSCFDYVMHFLTVFWKVLFACVPPTEYCHGWACFGVSILVIGLLTALIGDLASHFGCTVGLKDSVNAVVFVALGTSIPDTFASKVAALQDQCADASIGNVTGSNAVNVFLGLGVAWSVAAVYWAVQGRPFEVRTGTLAFSVTLFTVFAFVGIAVLLYRRRPHIGGELGGPRGPKLATTALFLGLWLLYILFASLEAYCHIRGF

SEQ ID NO: 865 - DNA, 2685 bp, Homo sapiens; identical to SEQ ID NO: 861
  CDS (7)..(2679)

SEQ ID NO: 866 - protein, 891 aa, Homo sapiens
EAGGSGDVPSTGQNNESCSGSSDCKEGVILPIWYPENPSLGDKIARVIVYFVALIYMFLGVSIIADRFMASIEVITSQEREVTIKKPNGETSTTTIRVWNETVSNLTLMALGSSAPEILLSLIEVCGHGFIAGDLGPSTIVGSAAFNMFIIIGICVYVIPDGETRKIKHLRVFFITAAWSIFAYIWLYMILAVFSPGVVQVWEGLLTLFFFPVCVLLAWVADKRLLFYKYMHKKYRTDKHRGIIIETEGDHPKGIEMDGKMMNSHFLDGNLVPLEGKEVDESRREMIRILKDLKQKHPEKDLDQLVEMANYYALSHQQKSRAFYRIQATRMMTGAGNILKKHAAEQAKKASSMSEVHTDEPEDFISKVFFDPCSYQCLENCGAVLLTVVRKGGDMSKTMYVDYKTEDGSANAGADYEFTEGTVVLKPGETQKEFSVGIIDDDIFEEDEHFFVRLSNVRIEEEQPEEGMPPAIFNSLPLPRAVLASPCVATVTILDDDHAGIFTFECDTIHVSESIGVMEVKVLRTSGARGTVIVPFRTVEGTAKGGGEDFEDTYGELEFKNDETVKTIRVKIVDEEEYERQENFFIALGEPKWMERGISDVTDRKLTMEEEEAKRIAEMGKPVLGEHPKLEVIIEESYEFKTTVDKLIKKTNLALVVGTHSWRDQFMEAITVSAAGDEDEDESGEERLPSCFDYVMHFLTVFWKVLFACVPPTEYCHGWACFAVSILIIGMLTAIIGDLASHFGCTIGLKDSVTAVVFVAFGTSVPDTFASKAAALQDVYADASIGNVTGSNAVNVFLGIGLAWSVAAIYWALQGQEFHVSAGTLAFSVTLFTIFAFVCISVLLYRRRPHLGGELGGPRGCKLATTWLFVSLWLLYILFATLEAYCYIKGF

SEQ ID NO: 867 - DNA, 2778 bp, Homo sapiens; identical to SEQ ID NO: 859
  CDS (10)..(2772)

SEQ ID NO: 868 - protein, 921 aa, Homo sapiens; identical to SEQ ID NO: 856

SEQ ID NO: 869 - DNA, 2813 bp, Homo sapiens; identical to SEQ ID NO: 863
  CDS (9)..(2792)

SEQ ID NO: 870 - protein, 928 aa, Homo sapiens; identical to SEQ ID NO: 864

SEQ ID NO: 871 - DNA, 1551 bp, Homo sapiens
  CDS (108)..(1511)
gcggccgcgggagctgaccctgcggggtcccggggggggagggggagccgcgaagcccccactgaggccgccgctgccgggcctcccctcccccccgggcgggcgccatgcgggggagcccgggcgacgcggagcggcggcagcgctggggtcgcctgttcgaggagctggacagtaacaaggatggccgcgtggacgtgcacgagttgcgccaggggctggccaggctgggcgggggcaacccagaccccggcgcccaacagggtatctcctctgagggtgatgctgacccagatggcgggctcgacctggaggaattttcccgctatctgcaggagcgggaacagcgtctgctgctcatgtttcacagtcttgaccggaaccaggatggtcacattgatgtctctgagatccaacagagtttccgagctctgggcatttccatctcgctggagcaggctgagaaaattttgcacagcatggaccgagacggcacaatgaccattgactggcaagaatggcgcgaccacttcctgttgcattcgctggaaaatgtggaggacgtgctgtatttctggaagcattccacggtcctggacattggcgagtgcctgacagtgccggacgagttctcaaagcaagagaagctgacgggcatgtggtggaaacagctggtggccggcgcagtggcaggtgccgtgtcacggacaggcacggcccctctggaccgcctcaaggtcttcattcaggtccatgcctcaaagaccaaccggctgaacatccttggggggcttcgaagcatggtccttgagggaggcatccgctgcctgtggcgcggcaatggtattaatgtactcaagattgcccccgagtcagctatcaagttcatggcctatgaacaggtgaggagggccatcctggggcagcaggagacactgcatgtgcaggagcgcttcgtggctggctccctggctggtgccacagcccaaaccatcatttaccctatggaggtgctgaagacgcggctgaccttgcgccggacgggccagtataaggggctgctggactgcgccaggcgtatcctggagagggaggggccccgtgccttctaccgcggctacctccccaacgtgctgggcatcatcccctatgcgggcatcgacctggccgtctacgaggtcctgaagaactggtggcttcagcagtacagccacgactcggcagacccaggcatcctcgtgctcctggcctgcggtaccatatccagcacctgcggccagatagccagttacccgctggccctggtccggacccgcatgcaggcacaagcctccatcgagggtggcccccagctgtccatgctgggtctgctacgtcacatcctgtcccaggagggcatgcggggcctctaccgggggatcgcccccaacttcatgaaggttattccagctgtgagcatctcctatgtggtctacgagaacatgaagcaggccttgggggtcacgtccaggtgagggacccggagcccgtccccccaatccctcacccccc

SEQ ID NO: 872 - protein, 468 aa, Homo sapiens
MRGSPGDAERRQRWGRLFEELDSNKDGRVDVHELRQGLARLGGGNPDPGAQQGISSEGDADPDGGLDLEEFSRYLQEREQRLLLMFHSLDRNQDGHIDVSEIQQSFRALGISISLEQAEKILHSMDRDGTMTIDWQEWRDHFLLHSLENVEDVLYFWKHSTVLDIGECLTVPDEFSKQEKLTGMWWKQLVAGAVAGAVSRTGTAPLDRLKVFIQVHASKTNRLNILGGLRSMVLEGGIRCLWRGNGINVLKIAPESAIKFMAYEQVRRAILGQQETLHVQERFVAGSLAGATAQTIIYPMEVLKTRLTLRRTGQYKGLLDCARRILEREGPRAFYRGYLPNVLGIIPYAGIDLAVYEVLKNWWLQQYSHDSADPGILVLLACGTISSTCGQIASYPLALVRTRMQAQASIEGGPQLSMLGLLRHILSQEGMRGLYRGIAPNFMKVIPAVSISYVVYENMKQALGVTSR

SEQ ID NO: 873 - DNA, 1426 bp, Homo sapiens
  CDS (2)..(1426)
caccggatccaccatgcgggggagcccgggcgacgcggagcggcggcagcgctggggtcgcctgttcgaggagctggacagtaacaaggatggccgcgtggacgtgcacgagttgcgccaggggctggccaggctgggcgggggcaacccagaccccggcgcccaacagggtatctcctctgagggtgatgctgacccagatggcgggctcgacctggaggaattttcccgctatctgcaggagcgggaacagcgtctgctgctcatgtttcacagtcttgaccggaaccaggatggtcacattgatgtctctgagatccaacagagtttccgagctctgggcatttccatctcgctggagcaggctgagaaaattttgcacagcatggaccgagacggcacaatgaccattgactggcaagaatggcgcgaccacttcctgttgcattcgctggaaaatgtggaggacgtgctgtatttctggaagcattccacggtcctggacattggcgagtgcctgacagtgccggacgagttctcaaagcaagagaagctgacgggcatgtggtggaaacagctggtggccggcgcagtggcaggtgccgtgtcacggacaggcacggcccctctggaccgcctcaaggtcttcatgcaggtccatgcctcaaagaccaaccggctgaacatccttggggggcttcgaagcatggtccttgagggaggcatccgctccctgtggcgcggcaatggtattaatgtactcaagattgcccccgagtcagctatcaagttcatggcctatgaacagatcaagagggccatcctggggcagcaggagacactgcatgtgcaggagcgcttcgtggctggctccctggctggtgccacagcccaaaccatcatttaccctatggaggtgctgaagacgcggctgaccttgcgccggacgggccagtataaggggctgctggactgcgccaggcgtatcctggagagggaggggccccgtgccttctaccgcggctacctccccaacgtgctgggcatcatcccctatgcgggcatcgacctggccgtctacgagactctgaagaactggtggcttcagcagtacagccacgactcggcagacccaggcatcctcgtgctcctggcctgcggtaccatatccagcacctgcggccagatagccagttacccgctggccctggtccggacccgcatgcaggcacaagcctccatcgagggtggcccccagctgtccatgctgggtctgctacgtcacatcctgtcccaggagggcatgcggggcctctaccgggggatcgcccccaacttcatgaaggttattccagctgtgagcatctcctatgtggtctacgagaacatgaagcaggccttgggggtcacgtccaggctcgagggc

SEQ ID NO: 874 - protein, 475 aa, Homo sapiens
TGSTMRGSPGDAERRQRWGRLFEELDSNKDGRVDVHELRQGLARLGGGNPDPGAQQGISSEGDADPDGGLDLEEFSRYLQEREQRLLLMFHSLDRNQDGHIDVSEIQQSFRALGISISLEQAEKILHSMDRDGTMTIDWQEWRDHFLLHSLENVEDVLYFWKHSTVLDIGECLTVPDEFSKQEKLTGMWWKQLVAGAVAGAVSRTGTAPLDRLKVFMQVHASKTNRLNILGGLRSMVLEGGIRSLWRGNGINVLKIAPESAIKFMAYEQIKRAILGQQETLHVQERFVAGSLAGATAQTIIYPMEVLKTRLTLRRTGQYKGLLDCARRILEREGPRAFYRGYLPNVLGIIPYAGIDLAVYETLKNWWLQQYSHDSADPGILVLLACGTISSTCGQIASYPLALVRTRMQAQASIEGGPQLSMLGLLRHILSQEGMRGLYRGIAPNFMKVIPAVSISYVVYENMKQALGVTSRLEG

SEQ ID NO: 875 - DNA, 728 bp, Homo sapiens
  CDS (28)..(696)
agtcttgccttcttttgagcctaagtcatgagttggatgttcctcagagatctcctgagtggagtaaataaatactccactgggactggatggatttggctggctgtcgtgtttgtcttccgtttgctggtctacatggtggcagcagagcacgtgtggaaagatgagcagaaagagtttgagtgcaacagtagacagcccggttgcaaaaatgtgtgttttgatgacttcttccccatttcccaagtcagactttgggccttacaactgataatggtctccacaccttcacttctggtggttttacatgtagcctatcatgagggtagagagaaaaggcacagaaagaaactctatgtcagcccaggtacaatggatgggggcctatggtacgcttatcttatcagcctcattgttaaaactggttttgaaattggcttccttgttttattttataagctatatgatggctttagtgttccctaccttataaagtgtgatttgaagccttgtcccaacactgtggactgcttcatctccaaacccactgagaagacgatcttcatcctcttcttggtcatcacctcatgcttgtgtattgtgttgaatttcattgaactgagttttttggttctcaagtgctttattaagtgctgtctccaaaaatatttaaaaaaacctcaagtcctcagtgtgtgagtgccacagcctcagatatgttgaatgtg

SEQ ID NO: 876 - protein, 223 aa, Homo sapiens
MSWMFLRDLLSGVNKYSTGTGWIWLAVVFVFRLLVYMVAAEHVWKDEQKEFECNSRQPGCKNVCFDDFFPISQVRLWALQLIMVSTPSLLVVLHVAYHEGREKRHRKKLYVSPGTMDGGLWYAYLISLIVKTGFEIGFLVLFYKLYDGFSVPYLIKCDLKPCPNTVDCFISKPTEKTIFILFLVITSCLCIVLNFIELSFLVLKCFIKCCLQKYLKKPQVLSV

SEQ ID NO: 877 - DNA, 700 bp, Homo sapiens
  CDS (2)..(700)
aggctccgcggccgcccccttcaccggatccatgagttggatgttcctcagagatctcctgagtggagtaaataaatactccactgggattggatggatttggctggctgtcgtgtttgtcttccgtttgctggtctacatggtggcagcagagcacgtgtggaaagatgagcagaaagagtttgagtgcaacagtagacagcccggttgcaaaaatgtgtgttttgatgacttcttccccatttcccaagtcagactttgggccgtacaactgataatggtctccacaccttcacttctggtggttttacatgtagcctatcatgagggtagagagaaaaggcacagaaagaaactctatgtcagcccaggtacaatggatgggggcctatggtacgcttatcttatcagcctcattgttaaaactggttttgaaattggcttccttgttttattttataagctatatgatggctttagtgttccctaccttataaagtgtgatttgaagccttgtcccaacactgtggactgcttcatctccaaacccactgagaagacgatcttcatcctcttcttggtcatcacctcatgcttgcgtattgtgttgaatttcattgaactgagttttttgctcgagggcaagggtgggcgcgccgacccagctttcttgtacaaaagttggcattttataagaaaa

SEQ ID NO: 878 - protein, 233 aa, Homo sapiens
GSAAAPFTGSMSWMFLRDLLSGVNKYSTGIGWIWLAVVFVFRLLVYMVAAEHVWKDEQKEFECNSRQPGCKNVCFDDFFPISQVRLWAVQLIMVSTPSLLVVLHVAYHEGREKRHRKKLYVSPGTMDGGLWYAYLISLIVKTGFEIGFLVLFYKLYDGFSVPYLIKCDLKPCPNTVDCFISKPTEKTIFILFLVITSCLRIVLNFIELSFLLEGKGGRADPAFLYKSWHFIRK

SEQ ID NO: 879 - DNA, 724 bp, Homo sapiens
  CDS (2)..(724)
aggctccgcggccgcccccttcaccggatccatgagttggatgttcctcagagatctcctgagtggagtaaataaatactccactgggattggatggatttggctggctgtcgtgtttgtcttccgtttgctggtctacatggtggcagcagagcacgtgtggaaagatgagcagaaagagtttgagtgcaacagtagacagcccggttgcaaaaatgtgtgttttgatgacttcttccccatttcccaagtcagactttgggccttacaactgataatggtctccacaccttcacttctggtggttttacatgtagcctatcatgagggtagagagaaaaggcacagaaagaaactctatgtcagcccaggtacaatggatgggggcctatggtacgcttatcttatcagcctcattgttaaaactggttttgaaattggcttccttgttttattttataagctatatgatggctttagtgttccctaccttataaagtgtgatttgaagccttgtcccaacactgtggactgcttcatctccaaacccactgagaagacgatcttcatcctcttcttggtcatcacctcatgcttgcgtattgtgttgaattccattgaactgagttttttggttctcaagtgccttattaagtgctgtctccaaaaatatttaaaaaaacctcaagtcctcagtgtgctcgagggcaagggtgggcgcgcc

SEQ ID NO: 880 - protein, 241 aa, Homo sapiens
GSAAAPFTGSMSWMFLRDLLSGVNKYSTGIGWIWLAVVFVFRLLVYMVAAEHVWKDEQKEFECNSRQPGCKNVCFDDFFPISQVRLWALQLIMVSTPSLLVVLHVAYHEGREKRHRKKLYVSPGTMDGGLWYAYLISLIVKTGFEIGFLVLFYKLYDGFSVPYLIKCDLKPCPNTVDCFISKPTEKTIFILFLVITSCLRIVLNSIELSFLVLKCLIKCCLQKYLKKPQVLSVLEGKGGRA

SEQ ID NO: 881 - DNA, 538 bp, Homo sapiens
  CDS (2)..(538)
aggctccgcggccgcccccttcaccggatccgagcacgtgtggaaagatgagcagaaagagtttgagtgcaacagtagacagcccggttgcaaaaatgtgtgttttgatgacttcttccccatttcccaagtcagactttgggccttacaactgataatggtctccacaccttcacttctggtggttttacatgtagcctatcatgagggtagagagaaaaggcacagaaagaaactctatgtcagcccaggtacaatggatgggggcctatggtacgcttatcttatcagcctcattgttaaaactggttttgaaattggcttccttgttttattttataagctatatgatggctttagtgttccctaccttataaagtgtgatttgaagccttgtcccaacactgtggactgcttcatctccaaacccactgagaagacgatcttcatcctcttcttggtcatcacctcatgcttgcgtattgtgttgaatttcattgaactgagttttttgctcgagggcaagggtgggcgcgcc

SEQ ID NO: 882 - protein, 179 aa, Homo sapiens
GSAAAPFTGSEHVWKDEQKEFECNSRQPGCKNVCFDDFFPISQVRLWALQLIMVSTPSLLVVLHVAYHEGREKRHRKKLYVSPGTMDGGLWYAYLISLIVKTGFEIGFLVLFYKLYDGFSVPYLIKCDLKPCPNTVDCFISKPTEKTIFILFLVITSCLRIVLNFIELSFLLEGKGGRA

SEQ ID NO: 883 - DNA, 658 bp, Homo sapiens
  CDS (2)..(658)
aggctccgcggccgcccccttcaccggatccatgagttggatgttcctcagagatctcctgagtggagtaaataaatactccactgggattggatggatttggctggctgtcgtgtttgtcttccgtttgctggtctacatggtggcagcagagcacgtgtggaaagatgagcagaaagagtttgagtgcaacagtagacagcccggttgcaaaaatgtgtgttttgatgacttcttccccatttcccaagtcagactttgggccttacaactgataatggtctccacaccttcacttctggtggttttacatgtagcctatcatgagggtagagagaaaaggcacagaaagaaactctatgtcagcccaggtacaatggatgggggcctatggtacgcttatcttatcagcctcattgttaaaactggttttgaaattggcttccttgttttattttataagctatatgatggctttagtgttccctaccttataaagtgtgatttgaagccttgtcccaacactgtggactgcttcatctccaaacccactgagaagacgatcttcatcctcttcttggtcatcacctcatgcttgcgtattgtgttgaatttcattgaactgagttttttgctcgagggcaagggtgggcgcgcc

SEQ ID NO: 884 - protein, 219 aa, Homo sapiens
GSAAAPFTGSMSWMFLRDLLSGVNKYSTGIGWIWLAVVFVFRLLVYMVAAEHVWKDEQKEFECNSRQPGCKNVCFDDFFPISQVRLWALQLIMVSTPSLLVVLHVAYHEGREKRHRKKLYVSPGTMDGGLWYAYLISLIVKTGFEIGFLVLFYKLYDGFSVPYLIKCDLKPCPNTVDCFISKPTEKTIFILFLVITSCLRIVLNFIELSFLLEGKGGRA

SEQ ID NO: 885 - DNA, 604 bp, Homo sapiens
  CDS (2)..(604)
aggctccgcggccgcccccttcaccggatccgagcacgtgtggaaagatgagcagaaagagtttgagtgcaacagtagacagcccggttgcaaaaatgtgtgttttgatgacttcttccccatttcccaagtcagactttgggccttacaactgataatggtctccacaccttcacttctggtggttttacatgtagcctatcatgagggtagagagaaaaggcacagaaagaaactctatgtcagcccaggtacaatggatgggggcctatggtacgcttatcttatcagcctcattgttaaaactggttttgaaattggcttccttgttttattttataagctatatgatggctttagtgttccctaccttataaagtgtgatttgaagccttgtcccaacactgtggactgcttcatctccaaacccactgagaagacgatcttcatcctcttcttggtcatcacctcatgcttgcgtattgtgttgaattccattgaactgagttttttggttctcaagtgccttattaagtgctgtctccaaaaatatttaaaaaaacctcaagtcctcagtgtgctcgagggcaagggtgggcgcgcc

SEQ ID NO: 886 - protein, 201 aa, Homo sapiens
GSAAAPFTGSEHVWKDEQKEFECNSRQPGCKNVCFDDFFPISQVRLWALQLIMVSTPSLLVVLHVAYHEGREKRHRKKLYVSPGTMDGGLWYAYLISLIVKTGFEIGFLVLFYKLYDGFSVPYLIKCDLKPCPNTVDCFISKPTEKTIFILFLVITSCLRIVLNSIELSFLVLKCLIKCCLQKYLKKPQVLSVLEGKGGRA

SEQ ID NO: 887 - DNA, 727 bp, Homo sapiens
  CDS (27)..(695)
agtcttgcttcttttgagcctaagtcatgagttggatgttcctcagagatctcctgagtggagtaaataaatactccactgggattggatggatttggctggctgtcgtgtttgtcttccgtttgctggtctacatggtggcagcagagcacgtgtggaaagatgagcagaaagagtttgagtgcaacagtagacagcccggttgcaaaaatgtgtgttttgatgacttcttccccatttcccaagtcagactttgggccttacaactgataatggtctccacaccttcacttctggtggttttacatgtagcctatcatgagggtagagagaaaaggcacagaaagaaactctatgtcagcccaggtacaatggatgggggcctatggtacgcttatcttatcagcctcattgttaaaactggttttgaaattggcttccttgttttattttataagctatatgatggctttagtgttccctaccttataaagtgtgatttgaagccttgtcccaacactgtggactgcttcatctccaaacccactgagaagacgatcttcatcctcttcttggtcatcacctcatgcttgtgtattgtgttgaatttcattgaactgagttttttggttctcaagtgctttattaagtgctgtctccaaaaatatttaaaaaaacctcaagtcctcagtgtgtgagtgccacagcctcagatatgttgaatgtg

SEQ ID NO: 888 - protein, 223 aa, Homo sapiens [sequence omitted]

SEQ ID NO: 889 - DNA, 24 bp, Homo sapiens
  CDS (1)..(24)
tttgagcaaaacagaagacagccc

SEQ ID NO: 890 - protein, 8 aa, Homo sapiens
FEQNRRQP

SEQ ID NO: 891 - DNA, 24 bp, Homo sapiens
  CDS (1)..(24)
tttgagtgcaacaggagacagccc

SEQ ID NO: 892 - protein, 8 aa, Homo sapiens
FECNRRQP

SEQ ID NO: 893 - DNA, 24 bp, Homo sapiens
  CDS (1)..(24)
tttgagcaaaacagtagacagccc

SEQ ID NO: 894 - protein, 8 aa, Homo sapiens
FEQNSRQP

SEQ ID NO: 895 - DNA, 24 bp, Homo sapiens
  CDS (1)..(24)
tttgagtgcaacagtagacagccc

SEQ ID NO: 896 - protein, 8 aa, Homo sapiens
FECNSRQP

SEQ ID NO: 897 - DNA, 24 bp, Homo sapiens
  CDS (1)..(24)
tttgagcaaaacagtagacaggcc

SEQ ID NO: 898 - protein, 8 aa, Homo sapiens
FEQNSRQA

SEQ ID NO: 899 - DNA, 24 bp, Homo sapiens
  CDS (1)..(24)
tttgagtgcaacagtagacaggcc

SEQ ID NO: 900 - protein, 8 aa, Homo sapiens
FECNSRQA

SEQ ID NO: 901 - DNA, 728 bp, Homo sapiens
  CDS (28)..(696)
agtcttgccttcttttgagcctaagtcatgagttggatgttcctcagagatctcctgagtggagtaaataaatactccactgggattggatggatttggctggctgtcgtgtttgtcttccgtttgctggtctacatggtggcagcagagcacgtgtggaaagatgagcagaaagagtttgagtgcaacagtagacagcccggttgcaaaaatgtgtgttttgatgacttcttccccatttcccaagtcagactttgggccttacaactgataatggtctccacaccttcacttctggtggttttacatgtagcctatcatgagggtagagagaaaaggcacagaaagaaactctatgtcagcccaggtacaatggatgggggcctatggtacgcttatcttatcagcctcattgttaaaactggttttgaaattggcttccttgttttattttataagctatatgatggctttagtgttccctaccttataaagtgtgatttgaagccttgtcccaacactgtggactgcttcatctccaaacccactgagaagacgatcttcatcctcttcttggtcatcacctcatgcttgtgtattgtgttgaatttcattgaactgagttttttggttctcaagtgctttattaagtgctgtctccaaaaatatttaaaaaaacctcaagtcctcagtgtgtgagtgccacagcctcagatatgttgaatgtg

SEQ ID NO: 902 - protein, 223 aa, Homo sapiens [sequence omitted]

SEQ ID NO: 903 - DNA, 728 bp, Homo sapiens
  CDS (28)..(696)
agtcttgccttcttttgagcctaagtcatgagttggatgttcctcagagatctcctgagtggagtaaataaatactccactgggactggatggatttggctggctgtcgtgtttgtcttccgtttgctggtctacatggtggcagcagagcacatgtggaaagatgagcagaaagagtttgagtgcaacagtagacagcccggttgcaaaaatgtgtgttttgatgacttcttccccatttcccaagtcagactttgggccttacaactgataatggtctccacaccttcacttctggtggttttacatgtagcctatcatgagggtagagagaaaaggcacagaaagaaactctatgtcagcccaggtacaatggatgggggcctatggtacgcttatcttatcagcctcattgttaaaactggttttgaaattggcttccttgttttattttataagctatatgatggctttagtgttccctaccttataaagtgtgatttgaagccttgtcccaacactgtggactgcttcatctccaaacccactgagaagacgatcttcatcctcttcttggtcatcacctcatgcttgtgtattgtgttgaatttcattgaactgagttttttggttctcaagtgctttattaagtgctgtctccaaaaatatttaaaaaaacctcaagtcctcagtgtgtgagtgccacagcctcagatatgttgaatgtg

SEQ ID NO: 904 - protein, 223 aa, Homo sapiens [sequence omitted]

SEQ ID NO: 905 - DNA, 728 bp, Homo sapiens
  CDS (28)..(696)
agtcttgccttcttttgagcctaagtcatgagttggatgttcctcagagatctcctgagtggagtaaataaatactccactgggactggatggatttggctggctgtcgtgtttgtcttccgtttgctggtctacatggtggcagcagagcacgtgtggaaagatgagcagaaagagtttgagtgcaacagtagacagcccggttgcaaaaatgtgtgttttgatgacttcttccccatttcccaagtcagactttgggccttacaactgataatagtctccacaccttcacttctggtggttttacatgtagcctatcatgagggtagagagaaaaggcacagaaagaaactctatgtcagcccaggtacaatggatgggggcctatggtacgcttatcttatcagcctcattgttaaaactggttttgaaattggcttccttgttttattttataagctatatgatggctttagtgttccctaccttataaagtgtgatttgaagccttgtcccaacactgtggactgcttcatctccaaacccactgagaagacgatcttcatcctcttcttggtcatcacctcatgcttgtgtattgtgttgaatttcattgaactgagttttttggttctcaagtgctttattaagtgctgtctccaaaaatatttaaaaaaacctcaagtcctcagtgtgtgagtgccacagcctcagatatgttgaatgtg

SEQ ID NO: 906 - protein, 223 aa, Homo sapiens [sequence omitted]

SEQ ID NO: 907 - DNA, 728 bp, Homo sapiens
  CDS (28)..(696)
agtcttgccttcttttgagcctaagtcatgagttggatgttcctcagagatctcctgagtggagtaaataaatactccactgggactggatggatttggctggctgtcgtgtttgtcttccgtttgctggtctacatggtggcagcagagcacgtgtggaaagatgagcagaaagagtttgagtgcaacagtagacagcccggttgcaaaaatgtgtgttttgatgacttcttccccatttcccaagtcagactttgggccttacaactgataatggtctccacaccttcacttctggtggttttacatgtagcctatcatgagggtagagagaaaaggcacagaaagaaactctatgtcagcccaggtacaatggatgggggcctatggtacgcttatcttatcagcctcattgttaaaactggttttgaaattggcttccttgttttattttataagctatatgatggctttagtgttccctaccttataaagtgtgatttgaagccttgtcccaacactgtggactgcttcatctccaaacccactgagaagatgatcttcatcctcttcttggtcatcacctcatgcttgtgtattgtgttgaatttcattgaactgagttttttggttctcaagtgctttattaagtgctgtctccaaaaatatttaaaaaaacctcaagtcctcagtgtgtgagtgccacagcctcagatatgttgaatgtg

SEQ ID NO: 908 - protein, 223 aa, Homo sapiens [sequence omitted]

SEQ ID NO: 909 - DNA, 728 bp, Homo sapiens
  CDS (28)..(696)
agtcttgccttcttttgagcctaagtcatgagttggatgttcctcagagatctcctgagtggagtaaataaatactccactgggactggatggatttggctggctgtcgtgtttgtcttccgtttgctggtctacatggtggcagcagagcacgtgtggaaagatgagcagaaagagtttgagtgcaacagtagacagcccggttgcaaaaatgtgtgttttgatgacttcttccccatttcccaagtcagactttgggccttacaactgataatggtctccacaccttcacttctggtggttttacatgtagcctatcatgagggtagagagaaaaggcacagaaagaaactctatgtcagcccaggtacaatggatgggggcctatggtacgcttatcttatcagcctcattgttaaaactggttttgaaattggcttccttgttttattttataagctatatgatggctttagtgttccctaccttataaagtgtgatttgaagccttgtcccaacactgtggactgcttcatctccaaacccactgagaagacgatcttcatcctcttcttggtcatcacctcatgcttgtgtattgtgttgaatttcattgaactgagttttttggttctcaagtgccttattaagtgctgtctccaaaaatatttaaaaaaacctcaagtcctcagtgtgtgagtgccacagcctcagatatgttgaatgtg

SEQ ID NO: 910 - protein, 223 aa, Homo sapiens [sequence omitted]

SEQ ID NO: 911 - DNA, 2105 bp, Homo sapiens
  CDS (31)..(2055)
cctcaggatccagaggtctcgttcaggaccatggagagcggcaccagcagccctcagcctccacagttagatcccctggatgcgtttccccagaagggcttggagcctggggacatcgcggtgctagttctgtacttcctctttgtcctggctgttggactatggtccacagtgaagaccaaaagagacacagtgaaaggctacttcctggctggaggggacatggtgtggtggccagtgggtgcatccttgtttgccagcaatgttggaagtggacatttcattggcctggcagggtcaggtgctgctacgggcatttctgtatcagcttatgaacttaatggcttgttttctgtgctgatgttggcctggatcttcctacccatctacattgctggtcaggtgaccacgatgccagaatacctacggaagcgcttcggtggcatcagaatccccatcatcctggctgtactctacctatttatctacatcttcaccaagatctcggtagacatgtatgcaggtgccatcttcatccagcagtctttgcacctggatctgtacctggccatagttgggctactggccatcactgctgtatacacggttgctggtggcctggctgctgtgatctacacggatgccctgcagacgctgatcatgcttataggagcgctcaccttgatgggctacagtttcgccgcggttggtgggatggaaggactgaaggagaagtacttcttggccctggctagcaaccggagtgagaacagcagctgcgggctgccccgggaagatgccttccatattttccgagatccgctgacatctgatctcccgtggccgggggtcctatttggaatgtccatcccatccctctggtactggtgcacggatcaggtaattgtccagcggactctggctgccaagaacctgtcccatgccaaaggaggtgctctgatggctgcatacctgaaggtgctgcccctcttcataatggtgttccctgggatggtcagccgcatcctcttcccagatcaagtggcctgtgcagatccagagatctgccagaagatctgcagcaacccctcaggctgttcggacatcgcgtatcccaaactcgtgctggaactcctgcccacaggtctccgtgggctgatgatggctgtgatggtggcggctctcatgtcctccctcacctccatctttaacagtgccagcaccatcttcaccatggacctctggaatcacctccggcctcgggcatctgagaaggagctcatgattgtgggcagggtgtttgtgctgctgctggtcctggtctccatcctctggatccctgtggtccaggccagccagggcggccagctcttcatctatatccagtccatcagctcctacctgcagccgcctgtggcggtggtcttcatcatgggatgtttctggaagaggaccaatgaaaagggtgccttctggggcctgatctcgggcctgctcctgggcttggttaggctggtcctggactttatttacgtgcagcctcgatgcgaccagccagatgagcgcccggtcctggtgaagagcattcactacctctacttctccatgatcctgtccacggtcaccctcatcactgtctccaccgtgagctggttcacagagccaccctccaaggagatggtcagccacctgacctggtttactcgtcacgaccccgtggtccagaaggaacaagcaccaccagcagctcccttgtctcttaccctctctcagaacgggatgccagaggccagcagcagcagcagcgtccagttcgagatggttcaagaaaacacgtctaaaacccacagcggtgacatgaccccaaagcagtccaaagtggtgaaggccatcctgtggctctgtggaatacaggagaagggcaaggaagagctcccggccagagcagaagccatcatagtttccctggaagaaaaccccttggtgaagaccctcctggacgtcaacctcattttctgcgtgagctgcgccatctttatctggggctattttgcttagtgtggggtgaacccaggggtccaaactctgtttctcttcagtgctcc

SEQ ID NO: 912 - protein, 675 aa, Homo sapiens
MESGTSSPQPPQLDPLDAFPQKGLEPGDIAVLVLYFLFVLAVGLWSTVKTKRDTVKGYFLAGGDMVWWPVGASLFASNVGSGHFIGLAGSGAATGISVSAYELNGLFSVLMLAWIFLPIYIAGQVTTMPEYLRKRFGGIRIPIILAVLYLFIYIFTKISVDMYAGAIFIQQSLHLDLYLAIVGLLAITAVYTVAGGLAAVIYTDALQTLIMLIGALTLMGYSFAAVGGMEGLKEKYFLALASNRSENSSCGLPREDAFHIFRDPLTSDLPWPGVLFGMSIPSLWYWCTDQVIVQRTLAAKNLSHAKGGALMAAYLKVLPLFIMVFPGMVSRILFPDQVACADPEICQKICSNPSGCSDIAYPKLVLELLPTGLRGLMMAVMVAALMSSLTSIFNSASTIFTMDLWNHLRPRASEKELMIVGRVFVLLLVLVSILWIPVVQASQGGQLFIYIQSISSYLQPPVAVVFIMGCFWKRTNEKGAFWGLISGLLLGLVRLVLDFIYVQPRCDQPDERPVLVKSIHYLYFSMILSTVTLITVSTVSWFTEPPSKEMVSHLTWFTRHDPVVQKEQAPPAAPLSLTLSQNGMPEASSSSSVQFEMVQENTSKTHSGDMTPKQSKVVKAILWLCGIQEKGKEELPARAEAIIVSLEENPLVKTLLDVNLIFCVSCAIFIWGYFA

SEQ ID NO: 913 - DNA, 1309 bp, Homo sapiens
  CDS (2)..(1309)
caccggatcctacttcctggctggaggggacatggtgtggtggccagtgggtgcatccttgtttgccagcaatgttggaagtggacatttcattggcctggcagggtcaggtgctgctacgggcatttctgtatcagcttatgaacttaatggcttgttttctgtgctgatgttggcctggatcttcctacccatctacattgctggtcaggtcaccacgatgccagaatacctacggaagcgcttcggtggcatcagaatccccatcatcctggctgtactctacctatttatctacatcttcaccaagatctcggtagacatgtatgcaggtgccatcttcatccagcagtctttgcacctggatctgtacctggccatagttgggctactggccatcactgctgtatacacggttgctggtggcctggctgctgtgatctacacggatgccctgcagacgctgatcatgcttataggagcgctcaccttgatgggctacagtttcgccgcggttggtgggatggaaggactgaaggagaagtacttcttggccctggctagcaaccggagtgagaacagcagctgcgggctgccccgggaagatgccttccatattttccgagatccgctgacatctgatctcccgtggccgggggtcctatttggaatgtccatcccatccctctggtactggtgcacggatcaggtgattgtccagcggactctggctgccaagaacctgtcccatgccaaaggaggtgctctgatggctgcatacctgaaggtgctgcccctcttcataatggtgttccctgggatggtcagccgcatcctcttcccagatcaagtggcctgtgcagatccagagatctgccagaagatctgcagcaacccctcaggctgttcggacatcgcgtatcccaaactcgtgctggaactcctgcccacagggctccgtgggctgatgatggctgtgatggtggcggctctcatgtcctccctcacctccatctttaacagtgccagcaccatcttcaccatggacctctggaatcacctccggcctcgggcatctgagaaggagctcatgattgtgggcagggtgtttgtgctgctgctggtcctggtctccatcctctggatccctgtggtccaggccagccagggcggccagctcttcatctatatccagtccatcagctcctacctgcagccgcctgtggcggtggtcttcatcatgggatgtttctggaagaggaccaatgaaaagggtgccttctggggcctgatctcgggcctcgagggc

SEQ ID NO: 914 - protein, 436 aa, Homo sapiens
TGSYFLAGGDMVWWPVGASLFASNVGSGHFIGLAGSGAATGISVSAYELNGLFSVLMLAWIFLPIYIAGQVTTMPEYLRKRFGGIRIPIILAVLYLFIYIFTKISVDMYAGAIFIQQSLHLDLYLAIVGLLAITAVYTVAGGLAAVIYTDALQTLIMLIGALTLMGYSFAAVGGMEGLKEKYFLALASNRSENSSCGLPREDAFHIFRDPLTSDLPWPGVLFGMSIPSLWYWCTDQVIVQRTLAAKNLSHAKGGALMAAYLKVLPLFIMVFPGMVSRILFPDQVACADPEICQKICSNPSGCSDIAYPKLVLELLPTGLRGLMMAVMVAALMSSLTSIFNSASTIFTMDLWNHLRPRASEKELMIVGRVFVLLLVLVSILWIPVVQASQGGQLFIYIQSISSYLQPPVAVVFIMGCFWKRTNEKGAFWGLISGLEG

SEQ ID NO: 915 - DNA, 1912 bp, Homo sapiens
  CDS (2)..(1912)
agaattcgccttcaccggatccaaaagagacacagtgaaaggctacttcctggctggaggggacatggtgtggtggccagtgggtgcatccttgtttgccagcaatgttggaagtggacatttcattggcctggcagggtcaggtgctgctacgggcatttctgtatcagcttatgaacttaatggcttgttttctgtgctgatgttggcctggatcttcctacccatctacattgctggtcaggtcaccacgatgccagaatacctacggaagcgcttcggtggcatcagaatccccatcatcctggctgtactctacctatttatctacatcttcaccaagatctcggtagacatgtatgcaggtgccatcttcatccagcagtctttgcacctggatctgtacctggccatagttgggctactggccatcactgctgtatacacggttgctggtggcctggctgctgtgatctacacggatgccctgcagacgctgatcatgcttataggagcgctcaccttgatgggctacagtttcgccgcggttggtgggatggaaggactgaaggagaagtacttcttggccctggctagcaaccggagtgagaacagcagctgcgggctgccccgggaagatgccttccatattttccgagatccgctgacatctgatctcccgtggccgggggtcctatttggaatgtccatcccatccctctggtactggtgcacggatcaggtgattgtccagcggactctggctgccaagaacctgtcccatgccaaaggaggtgctctgatggctgcatacctgaaggtgctgcccctcttcataatggtgttccctgggatggtcagccgcatcctcttcccagatcaagtggcctgtgcagatccagagatctgccagaagatctgcagcaacccctcaggctgttcggacatcgcgtatcccaaactcgtgctggaactcctgcccacagggctccgtgggctgatgatggctgtgatggtggcggctctcatgtcctccctcacctccatctttaacagtgccagcaccatcttcaccatggacctctggaatcacctccggcctcgggcatctgagaaggagctcatgattgtgggcagggtgtttgtgctgctgctggtcctggtctccatcctctggatccctgtggtccaggccagccagggcggccagctcttcatctatatccagtccatcagctcctacctgcagccgcctgtggcggtggtcttcatcatgggatgtttctggaagaggaccaatgaaaagggtgccttctggggcctgatctcgggcctgctcctgggcttggttaggctggtcctggactttatttacgtgcagcctcgatgcgaccagccagatgagcgcccggtcctggtgaagagcattcactacctctacttctccatgatcctgtccacggtcaccctcatcactgtctccaccgtgagctggttcacagagccaccctccaaggagatggtcagccacctgacctggtttactcgtcacgaccccgtggtccagaaggaacaagcaccaccagcagctcccttgtctcttaccctctctcagaacgggatgccagaggccagcagcagcagcagcgtccagttcgagatggttcaagaaaacacgtctaaaacccacagctgtgacatgaccccaaagcagtccaaagtggtgaaggccatcctgtggctctgtggaatacaggagaagggcaaggaagagctcccggccagagcagaagccatcatagtttccctggaagaaaaccccttggtgaagaccctcctggacgtcaacctcattttctgcgtgagctgcgccatctttatctggggctattttgctctcgagggcagggcg

SEQ ID NO: 916 - protein, 637 aa, Homo sapiens
EFAFTGSKRDTVKGYFLAGGDMVWWPVGASLFASNVGSGHFIGLAGSGAATGISVSAYELNGLFSVLMLAWIFLPIYIAGQVTTMPEYLRKRFGGIRIPIILAVLYLFIYIFTKISVDMYAGAIFIQQSLHLDLYLAIVGLLAITAVYTVAGGLAAVIYTDALQTLIMLIGALTLMGYSFAAVGGMEGLKEKYFLALASNRSENSSCGLPREDAFHIFRDPLTSDLPWPGVLFGMSIPSLWYWCTDQVIVQRTLAAKNLSHAKGGALMAAYLKVLPLFIMVFPGMVSRILFPDQVACADPEICQKICSNPSGCSDIAYPKLVLELLPTGLRGLMMAVMVAALMSSLTSIFNSASTIFTMDLWNHLRPRASEKELMIVGRVFVLLLVLVSILWIPVVQASQGGQLFIYIQSISSYLQPPVAVVFIMGCFWKRTNEKGAFWGLISGLLLGLVRLVLDFIYVQPRCDQPDERPVLVKSIHYLYFSMILSTVTLITVSTVSWFTEPPSKEMVSHLTWFTRHDPVVQKEQAPPAAPLSLTLSQNGMPEASSSSSVQFEMVQENTSKTHSCDMTPKQSKVVKAILWLCGIQEKGKEELPARAEAIIVSLEENPLVKTLLDVNLIFCVSCAIFIWGYFALEGRA

SEQ ID NO: 917 - DNA, 2105 bp, Homo sapiens
  CDS (31)..(2055)
cctcaggatccagaggtctcgttcaggaccatggagagcggcaccagcagccctcagcctccacagttagatcccctggatgcgtttccccagaagggcttggagcctggggacatcgcggtgctagttctgtacttcctctttgtcctggctgttggactatggtccacagtgaagaccaaaagagacacagtgaaaggctacttcctggctggaggggacatggtgtggtggccagtgggtgcatccttgtttgccagcaatgttggaagtggacatttcattggcctggcagggtcaggtgctgctacgggcatttctgtatcagcttatgaacttaatggcttgttttctgtgctgatgttggcctggatcttcctacccatctacattgctggtcaggtgaccacgatgccagaatacctacggaagcgcttcggtggcatcagaatccccatcatcctggctgtactctacctatttatctacatcttcaccaagatctcggtagacatgtatgcaggtgccatcttcatccagcagtctttgcacctggatctgtacctggccatagttgggctactggccatcactgctgtatacacggttgctggtggcctggctgctgtgatctacacggatgccctgcagacgctgatcatgcttataggagcgctcaccttgatgggctacagtttcgccgcggttggtgggatggaaggactgaaggagaagtacttcttggccctggctagcaaccggagtgagaacagcagctgcgggctgccccgggaagatgccttgcatattttccgagatccgctgacatctgatctcccgtggccgggggtcctatttggaatgtccatcccatccctctggtactggtgcacggatcaggtaattgtccagcggactctggctgccaagaacctgtcccatgccaaaggaggtgctctgatggctgcatacctgaaggtgctgcccctcttcataatggtgttccctgggatggtcagccgcatcctcttcccagatcaagtggcctgtgcagatccagagatctgccagaagatctgcagcaacccctcaggctgttcggacatcgcgtatcccaaactcgtgctggaactcctgcccacaggtctccgtgggctgatgatggctgtgatggtggcggctctcatgtcctccctcacctccatctttaacagtgccagcaccatcttcaccatggacctctggaatcacctccggcctcgggcatctgagaaggagctcatgattgtgggcagggtgtttgtgctgctgctggtcctggtctccatcctctggatccctgtggtccaggccagccagggcggccagctcttcatctatatccagtccatcagctcctacctgcagccgcctgtggcggtggtcttcatcatgggatgtttctggaagaggaccaatgaaaagggtgccttctggggcctgatctcgggcctgctcctgggcttggttaggctggtcctggactttatttacgtgcagcctcgatgcgaccagccagatgagcgcccggtcctggtgaagagcattcactacctctacttctccatgatcctgtccacggtcaccctcatcactgtctccaccgtgagctggttcacagagccaccctccaaggagatggtcagccacctgacctggtttactcgtcacgaccccgtggtccagaaggaacaagcaccaccagcagctcccttgtctcttaccctctctcagaacgggatgccagaggccagcagcagcagcagcgtccagttcgagatggttcaagaaaacacgtctaaaacccacagcggtgacatgaccccaaagcagtccaaagtggtgaaggccatcctgtggctctgtggaatacaggagaagggcaaggaagagctcccggccagagcagaagccatcatagtttccctggaagaaaaccccttggtgaagaccctcctggacgtcaacctcattttctgcgtgagctgcgccatctttatctggggctattttgcttagtgtggggtgaacccaggggtccaaactctgtttctcttcagtgctcc

SEQ ID NO: 918 - protein, 675 aa, Homo sapiens
MESGTSSPQPPQLDPLDAFPQKGLEPGDIAVLVLYFLFVLAVGLWSTVKTKRDTVKGYFLAGGDMVWWPVGASLFASNVGSGHFIGLAGSGAATGISVSAYELNGLFSVLMLAWIFLPIYIAGQVTTMPEYLRKRFGGIRIPIILAVLYLFIYIFTKISVDMYAGAIFIQQSLHLDLYLAIVGLLAITAVYTVAGGLAAVIYTDALQTLIMLIGALTLMGYSFAAVGGMEGLKEKYFLALASNRSENSSCGLPREDALHIFRDPLTSDLPWPGVLFGMSIPSLWYWCTDQVIVQRTLAAKNLSHAKGGALMAAYLKVLPLFIMVFPGMVSRILFPDQVACADPEICQKICSNPSGCSDIAYPKLVLELLPTGLRGLMMAVMVAALMSSLTSIFNSASTIFTMDLWNHLRPRASEKELMIVGRVFVLLLVLVSILWIPVVQASQGGQLFIYIQSISSYLQPPVAVVFIMGCFWKRTNEKGAFWGLISGLLLGLVRLVLDFIYVQPRCDQPDERPVLVKSIHYLYFSMILSTVTLITVSTVSWFTEPPSKEMVSHLTWFTRHDPVVQKEQAPPAAPLSLTLSQNGMPEASSSSSVQFEMVQENTSKTHSGDMTPKQSKVVKAILWLCGIQEKGKEELPARAEAIIVSLEENPLVKTLLDVNLIFCVSCAIFIWGYFA

SEQ ID NO: 919 - DNA, 557 bp, Homo sapiens
  CDS (26)..(523)
atggtggcagagtctacatagaactatgcttcgtggtgttctggggaaaacctttcgacttgttggctatactattcaatatggctgtatagctcattgtgcttttgaatacgttggtggtgttgtcatgtgttctggaccatcaatggagcctacaattcaaaattcagatattgtctttgcagaaaatcttagtcgacatttttatggtatccaaagaggtgacattgtgattgcaaaaagcccaagtgatccaaaatcaaatatttgtaaaagagtaattggtttggaaggagacaaaatcctcaccactagtccatcagatttctttaaaagccatagttatgtgccaatgggtcatgtttggttagaaggtgacaatctacagaattctacagattccaggtgctatggacctattccatatggactaataagaggacgaatcttctttaagatttggcctctgagtgattttggatttttacgtgccagccctaatggccacagattttctgatgattagtaagcatttattcttttgacttgattattgt

SEQ ID NO: 920 - protein, 166 aa, Homo sapiens
MLRGVLGKTFRLVGYTIQYGCIAHCAFEYVGGVVMCSGPSMEPTIQNSDIVFAENLSRHFYGIQRGDIVIAKSPSDPKSNICKRVIGLEGDKILTTSPSDFFKSHSYVPMGHVWLEGDNLQNSTDSRCYGPIPYGLIRGRIFFKIWPLSDFGFLRASPNGHRFSDD

SEQ ID NO: 921 - DNA, 513 bp, Homo sapiens
  CDS (16)..(444)
agtctacatagaactatgcttcgtggtgctctggggaaaccttctgaccttgttggctatgctattcagtatggctgtatagctcactgtgcttctgaatacgttggtggtgttgtcatgtgttctggaccatcaatggagcctacaattcaaaattcagatactgtctttgcacaaaatcttagtcgacattttgatagtatccaaagaggtgacattgtgattgcaaaaagcccaagtgatccaacatcaaatatttgtaaaagagtaactggtttggaaggagacaaaatcctcaccactagtccatcagatttctttaaaagctacagttatgtcccagtgggtcatgtttggttagaaggtgataatctacagaattctacagattccagttactatggacctattccatatgaactaataagaggacgaatcttcttttaagattcggcctctgagtgattttggatttttatgtgccagccttaatggccacagattttctgatga

SEQ ID NO: 922 - protein, 143 aa, Homo sapiens
MLRGALGKPSDLVGYAIQYGCIAHCASEYVGGVVMCSGPSMEPTIQNSDTVFAQNLSRHFDSIQRGDIVIAKSPSDPTSNICKRVTGLEGDKILTTSPSDFFKSYSYVPVGHVWLEGDNLQNSTDSSYYGPIPYELIRGRIFF

SEQ ID NO: 923 - DNA, 507 bp, Homo sapiens
  CDS (11)..(505)
acatagaactatgcttcgtggtgctctggggaaaacctttcgacttgttggctatactattcaatatggctgtatagctcattgtgcttttgaatacgttggtggtgttgtcatgtgttctggaccatcaatggagcctacaattcaaaattcagatattgtctttgcagaaaatcttagtcgacatttttatggtatccaaagaggtgacattgtgattgcaaaaagcccaagtgatccaaaatcaaatatttgtaaaagagtaattggtttggaaggagacaaaatcctcaccactagtccatcagatttctttaaaagccatagttatgtgccaatgggtcatgtttggttagaaggtgacaatctacagaattctacagattccaggtgctatggacctattccatatggactaataagaggacgaatcttctttaagatttggcctctgagtgattttggatttttacgtgccagccttaatggccacagattttctgatga

SEQ ID NO: 924 - protein, 165 aa, Homo sapiens
MLRGALGKTFRLVGYTIQYGCIAHCAFEYVGGVVMCSGPSMEPTIQNSDIVFAENLSRHFYGIQRGDIVIAKSPSDPKSNICKRVIGLEGDKILTTSPSDFFKSHSYVPMGHVWLEGDNLQNSTDSRCYGPIPYGLIRGRIFFKIWPLSDFGFLRASLNGHRFSD

SEQ ID NO: 925 - DNA, 1862 bp, Homo sapiens
  CDS (35)..(1828)
cgggctcatacctagtgcctgcggcaggacagccatggccgccaactccaccagcgacctccacactcccgggacgcagctgagcgtggctgacatcatcgtcatcactgtgtattttgctctgaacgtggccgtgggcatatggtcctcttgtcgggccagtaggaacacggtgaatggctacttcctggcaggccgggacatgacgtggtggccgattggagcctccctcttcgccagcagcgagggctctggcctcttcattggactggcgggctcaggcgcggcaggaggtctggccgtggcaggcttcgagtggaatgccacgtacgtgctgctggcactggcatgggtgttcgtgcccatctacatctcctcagagatcgtcaccttacctgagtacattcagaagcgctacgggggccagcggatccgcatgtacctgtctgtcctgtccctgctactgtctgtcttcaccaagatatcgctggacctgtacgcgggggctctgtttgtgcacatctgcctgggctggaacttctacctctccaccatcctcacgctcggcatcacagccctgtacaccatcgcagggggcctggctgctgtaatctacacggacgccctgcagacgctcatcatggtggtgggggctgtcatcctgacaatcaaagcttttgaccagatcggtggttacgggcagctggaggcagcctacgcccaggccattccctccaggaccattgccaacaccacctgccacctgccacgtacagacgccatgcacatgtttcgagacccccacacaggggacctgccgtggaccgggatgacctttggcctgaccatcatggccacctggtactggtgcaccgaccaggtcatcgtgcagcgatcactgtcagcccgggacctgaaccatgccaaggcgggctccatcctggccagctacctcaagatgctccccatgggcctgatcatcatgccgggcatgatcagccgcgcattgttcccaggtgctcatgtctatgaggagagacaccaagtgtccgtctctcgaacagatgatgtgggctgcgtggtgccgtccgagtgcctgcgggcctgcggggccgaggtcggctgctccaacatcgcctaccccaagctggtcatggaactgatgcccatcggtctgcgggggctgatgatcgcagtgatgctggcggcgctcatgtcgtcgctgacctccatcttcaacagcagcagcaccctcttcactatggacatctggaggcggctgcgtccccgctccggcgagcgggagctcctgctggtgggacggctggtcatagtggcactcatcggcgtgagtgtggcctggatccccgtcctgcaggactccaacagcgggcaactcttcatctacatgcagtcagtgaccagctccctggccccaccagtgactgcagtctttgtcctgggcctgatagcagggctggtggtgggggccacgaggctggtcctggaattcctgaacccagccccaccgtgcggagagccagacacgcggccagccgtcctggggagcatccactacctgcacttcgctgtcgccctctttgcactcagtggtgctgttgtggtggctggaagcctgctgaccccacccccacagagtgtccagattgagaaccttacctggtggaacctggctcaggatgtgcccttgggaactaaagcaggtgatggccaaacaccccagaaacacgccttctgggcccgtgtctgtggcttcaatgccatcctcctcatgtgtgtcaacatattcttttatgcctacttcgcctgacactgccatcctggacagaaaggcaggagct

SEQ ID NO: 926 - protein, 598 aa, Homo sapiens
MAANSTSDLHTPGTQLSVADIIVITVYFALNVAVGIWSSCRASRNTVNGYFLAGRDMTWWPIGASLFASSEGSGLFIGLAGSGAAGGLAVAGFEWNATYVLLALAWVFVPIYISSEIVTLPEYIQKRYGGQRIRMYLSVLSLLLSVFTKISLDLYAGALFVHICLGWNFYLSTILTLGITALYTIAGGLAAVIYTDALQTLIMVVGAVILTIKAFDQIGGYGQLEAAYAQAIPSRTIANTTCHLPRTDAMHMFRDPHTGDLPWTGMTFGLTIMATWYWCTDQVIVQRSLSARDLNHAKAGSILASYLKMLPMGLIIMPGMISRALFPGAHVYEERHQVSVSRTDDVGCVVPSECLRACGAEVGCSNIAYPKLVMELMPIGLRGLMIAVMLAALMSSLTSIFNSSSTLFTMDIWRRLRPRSGERELLLVGRLVIVALIGVSVAWIPVLQDSNSGQLFIYMQSVTSSLAPPVTAVFVLGLIAGLVVGATRLVLEFLNPAPPCGEPDTRPAVLGSIHYLHFAVALFALSGAVVVAGSLLTPPPQSVQIENLTWWNLAQDVPLGTKAGDGQTPQKHAFWARVCGFNAILLMCVNIFFYAYFA

SEQ ID NO: 927 - DNA, 1801 bp, Homo sapiens
  CDS (35)..(1789)
cgggctcatacctagtgcctgcggcaggacagccatggccgccaactccaccagcgacctccacactcccgggacgcagctgagcgtggctgacatcatcgtcatcactgtgtattttgctctgaacgtggccgtgggcatatggtcctcttgtcgggccagtaggaacacggtgaatggctacttcctggcaggccgggacatgacgtggtggccgattggagcctccctcttcgccagcagcgagggctctggcctcttcattggactggcgggctcaggcgcggcaggaggtctggccgtggcaggcttcgagtggaatgccacgtacgtgctgctggcactggcatgggtgttcgtgcccatctacatctcctcagagatcgtcaccttacctgagtacattcagaagcgctacgggggccagcggatccgcatgtacctgtctgtcctgtccctgctactgtctgtcttcaccaagatatcgctggacctgtacgcgggggctctgtttgtgcacatctgcctgggctggaacttctacctctccaccatcctcacgctcggcatcacagccctgtacaccatcgcagcttttgaccagatcggtggttacgggcagctggaggcagcctacgcccaggccattccctccaggaccattgccaacaccacctgccagctgccacgtacagacgccatgcacatgtttcgagacccccacacaggggacctgccgtggaccgggatgacctttggcctgaccatcatggccacctggtactggtgcaccgaccaggtcatcgtggagggatcactgtcagcccgggacctgaaccatgccaaggggggctccatcctgggcagctacctcaagatgctccccatgggcctgatcatcatgccgggcatgatcagccgcgcattgttcccaggtgctcatgtctatgaggagagacaccaagtgtccgtctctcgaacagatgatgtgggctgcgtggtgccgtccgagtgcctgcgggcctgcggggccgaggtcggctgctccaacatcgcctaccccaagctggtcatggaactgatgcccatcggtctgcgggggctgatgatcgcagtgatgctggcggcgctcatgtcgtcgctgacctccatcttcaacagcagcagcaccctcttcactatggacatctggaggcggctgcgtccccgctccggcgagcgggagctcctgctggtgggacggctggtcatagtggcactcatcggcgtgagtgtggcctggatccccgtcctgcaggactccaacagcgggcaactcttcatctacatgcagtcagtgaccagctccctggccccaccagtgactgcagtctttgtcctgggcgtcttctggcgacgtgccaacgagcagggggccttctggggcctgatagcagggctggtggtgggggccacgaggctggtcctggaattcctgaacccggccccaccgtgcggagagccagacacgcggccagccgtcctggggagcatccactacctgcacttcgctgtcgccctctttgcactcagtggtgctgttgtggtggctggaagcctgctgaccccacccccacagagtgtccagattgagaaccttacctggtggaccctggctcaggatgtgcccttgggaactaaagcaggtgatggccaaacaccccagaaacacgccttctgggcccgtgtctgtggcttcaatgccatcctcctcatgtgtgtcaacatattcttttatgcctacttcgcctgacactgccat

SEQ ID NO: 928 - protein, 585 aa, Homo sapiens
MAANSTSDLHTPGTQLSVADIIVITVYFALNVAVGIWSSCRASRNTVNGYFLAGRDMTWWPIGASLFASSEGSGLFIGLAGSGAAGGLAVAGFEWNATYVLLALAWVFVPIYISSEIVTLPEYIQKRYGGQRIRMYLSVLSLLLSVFTKISLDLYAGALFVHICLGWNFYLSTILTLGITALYTIAAFDQIGGYGQLEAAYAQAIPSRTIANTTCQLPRTDAMHMFRDPHTGDLPWTGMTFGLTIMATWYWCTDQVIVEGSLSARDLNHAKGGSILGSYLKMLPMGLIIMPGMISRALFPGAHVYEERHQVSVSRTDDVGCVVPSECLRACGAEVGCSNIAYPKLVMELMPIGLRGLMIAVMLAALMSSLTSIFNSSSTLFTMDIWRRLRPRSGERELLLVGRLVIVALIGVSVAWIPVLQDSNSGQLFIYMQSVTSSLAPPVTAVFVLGVFWRRANEQGAFWGLIAGLVVGATRLVLEFLNPAPPCGEPDTRPAVLGSIHYLHFAVALFALSGAVVVAGSLLTPPPQSVQIENLTWWTLAQDVPLGTKAGDGQTPQKHAFWARVCGFNAILLMCVNIFFYAYFA

SEQ ID NO: 929 - DNA, 1914 bp, Homo sapiens
  CDS (51)..(1838)
ttgcccctcagtccctcgggctcatacctagtgcctgcggcaggacagccatggccgccaactccaccagcgacctccacactcccgggacgcagctgagcgtggctgacatcatcgtcatcactgtgtattttgctctgaacgtggccgtgggcatatggtcctcttgtcgggccagtaggaacacggtgaatggctacttcctggcaggccgggacatgacgtggtggccgattggagcctccctcttcgccagcagcgagggctctggcctcttcattggactggcgggctcaggcgcggcaggaggtctggccgtggcaggcttcgagtggaatgccacgtacgtgctgctggcactggcatgggtgttcgtgcccatctacatctcctcagagatcgtcaccttacctgagtacattcagaagcgctacgggggccagcggatccgcatgtacctgtctgtcctgtccctgctactgtctgtcttcaccaagatatcgctggacctgtacgcgggggctctgtttgtgcacatctgcctgggctggaacttctacctctccaccatcctcacgctcggcatcacagccctgtacaccatcgcagggggcctggctgctgtaatctacacggacgccctgcagacgctcatcatggtggtgggggctgtcatcctgacaatcaaagcttttgaccagatcggtggttacgggcagctggaggcagcctacgcccaggccattccctccaggaccattgccaacaccacctgccacctgccacgtacagacgccatgcacatgtttcgagacccccacacaggggacctgccgtggaccgggatgacctttggcctgaccatcatggccacctggtactggtgcaccgaccaggtgatcgtgcagcgatcactgtcagcccgggacctgaaccatgccaaggcgggctccatcctggccagctacctcaagatgctccccatgggcctgatcataatgccgggcatgatcagccgcgcattgttcccagatgatgtgggctgcgtggtgccgtccgagtgcctgcgggcctgcggggccgaggtcggctgctccaacatcgcctaccccaagctggtcatggaactgatgcccatcggtctgcgggggctgatgatcgcagtgatgctggcggcgctcatgtcgtcgctgacctccatcttcaacagcagcagcaccctcttcactatggacatctggaggcggctgcgtccccgctccggcgagcgggagctcctgctggtgggacggctggtcatagtggcactcatcggcgtgagtgtggcctggatccccgtcctgcaggactccaacagcgggcaactcttcatctacatgcagtcagtgaccagctccctggccccaccagtgactgcagtctttgtcctgggcgtcttctggcgacgtgccaacgagcagggggccttctggggcctgatagcagggctggtggtgggggccacgaggctggtcctggaattcctgaacccagccccaccgtgcggagagccagacacgcggccagccgtcctggggagcatccactacctgcacttcgctgtcgccctctttgcactcagtggtgctgttgtggtggctggaagcctgctgaccccacccccacagagtgtccagattgagaaccttacctggtggaccctggctcaggatgtgcccttgggaactaaagcaggtgatggccaaacaccccagaaacacgccttctgggcccgtgtctgtggcttcaatgccatcctcctcatgtgtgtcaacatattcttttatgcctacttcgcctgacactgccatcctggacagaaaggcaggagctctgagtcctcaggtccacccatttccctcatggggatcccga

SEQ ID NO: 930 - protein, 596 aa, Homo sapiens
MAANSTSDLHTPGTQLSVADIIVITVYFALNVAVGIWSSCRASRNTVNGYFLAGRDMTWWPIGASLFASSEGSGLFIGLAGSGAAGGLAVAGFEWNATYVLLALAWVFVPIYISSEIVTLPEYIQKRYGGQRIRMYLSVLSLLLSVFTKISLDLYAGALFVHICLGWNFYLSTILTLGITALYTIAGGLAAVIYTDALQTLIMVVGAVILTIKAFDQIGGYGQLEAAYAQAIPSRTIANTTCHLPRTDAMHMFRDPHTGDLPWTGMTFGLTIMATWYWCTDQVIVQRSLSARDLNHAKAGSILASYLKMLPMGLIIMPGMISRALFPDDVGCVVPSECLRACGAEVGCSNIAYPKLVMELMPIGLRGLMIAVMLAALMSSLTSIFNSSSTLFTMDIWRRLRPRSGERELLLVGRLVIVALIGVSVAWIPVLQDSNSGQLFIYMQSVTSSLAPPVTAVFVLGVFWRRANEQGAFWGLIAGLVVGATRLVLEFLNPAPPCGEPDTRPAVLGSIHYLHFAVALFALSGAVVVAGSLLTPPPQSVQIENLTWWTLAQDVPLGTKAGDGQTPQKHAFWARVCGFNAILLMCVNIFFYAYFA

SEQ ID NO: 931 - DNA, 1912 bp, Homo sapiens
  CDS (35)..(1870)
cgggctcatacctagtgcctgcggcaggacagccatggccgccaactccaccagcgacctccacactcccgggacgcagctgagcgtggctgacatcatcgtcatcactgtgtattttgctctgaacgtggccgtgggcatatggtcctcttgtcgggccagtaggaacacggtgaatggctacttcctggcaggccgggacatgacgtggtggccgattggagcctccctcttcgccagcagcgagggctctggcctcttcattggactggcgggctcaggcgcggcaggaggtctggccgtggcaggcttcgagtggaatgccacgtacgtgctgctggcactggcatgggtgttcgtgcccatctacatctcctcagagatcgtcaccttacctgagtacattcagaagcgctacgggggccagcggatccgcatgtacctgtctgtcctgtccctgctactgtctgtcttcaccaagatatcgctggacctgtacgcgggggctctgtttgtgcacatctgcctgggctggaacttctacctctccaccatcctcacgctcggcatcacagccctgtacaccatcgcagggggcctggctgctgtaatctacacggacgccctgcagacgctcatcatggtggtgggggctgtcatcctgacaatcaaagcttttgaccagatcggtggttacgggcagctggaggcagcctacgcccaggccattccctccaggaccattgccaacaccacctgccacctgccacgtacagacgccatgcacatgtttcgagacccccacacaggggacctgccgtggaccgggatgacctttggcctgaccatcatggccacctggtactggtgcaccgaccaggtcatcgtgcagcgatcactgtcagcccgggacctgaaccatgccaaggcgggctccatcctggccagctacctcaagatgctccccatgggcctgatcatcatgccgggcatgatcagccgcgcattgttcccaggtgctcatgtctatgaggagagacaccaagtgtccgtctctcgaacagatgatgtgggctgcgtggtgccgtccgagtgcctgcgggcctgcggggccgaggtcggctgctccaacatcgcctaccccaagctggtcatggaactgatgcccatcggtctgcgggggctgatgatcgcagtgatgctggcggcgctcatgtcgtcgctgacctccatcttcaacagcagcagcaccctcttcactatggacatctggaggcggctgcgtccccgctccggcgagcgggagctcctgctggtgggacggctggtcatagtggcactcatcggcgtgagtgtggcctggatccccgtcctgcaggactccaacagcgggcaactcttcatctacatgcagtcagtgaccagctccctggccccaccagtgactgcagtctttgtcctgggcgtcttctggcgacgtgccaacgagcagggggccttctggggcctgatagcagggctggtggtgggggccacgaggctggtcctggaattcctgaacccagccccaccgtgcggagagccagacacgcggccagccgtcctggggagcatccactacctgcacttcgctgtcgccctctttgcactcagtggtgctgttgtggtggctggaagcctgctgaccccacccccacagagtgtccagattgagaaccttacctggtggaccctggctcaggatgtgcccttgggaactaaagcaggtgatggccaaacactccagaaacacgccttctgggcccgtgtctgtggcttcaatgccatcctcctcatgtgtgtcaacatattcttttatgcctacttcgcctgacactgccatcctggacagaaaggcaggagctctgagtcc

SEQ ID NO: 932 - protein, 612 aa, Homo sapiens
MAANSTSDLHTPGTQLSVADIIVITVYFALNVAVGIWSSCRASRNTVNGYFLAGRDMTWWPIGASLFASSEGSGLFIGLAGSGAAGGLAVAGFEWNATYVLLALAWVFVPIYISSEIVTLPEYIQKRYGGQRIRMYLSVLSLLLSVFTKISLDLYAGALFVHICLGWNFYLSTILTLGITALYTIAGGLAAVIYTDALQTLIMVVGAVILTIKAFDQIGGYGQLEAAYAQAIPSRTIANTTCHLPRTDAMHMFRDPHTGDLPWTGMTFGLTIMATWYWCTDQVIVQRSLSARDLNHAKAGSILASYLKMLPMGLIIMPGMISRALFPGAHVYEERHQVSVSRTDDVGCVVPSECLRACGAEVGCSNIAYPKLVMELMPIGLRGLMIAVMLAALMSSLTSIFNSSSTLFTMDIWRRLRPRSGERELLLVGRLVIVALIGVSVAWIPVLQDSNSGQLFIYMQSVTSSLAPPVTAVFVLGVFWRRANEQGAFWGLIAGLVVGATRLVLEFLNPAPPCGEPDTRPAVLGSIHYLHFAVALFALSGAVVVAGSLLTPPPQSVQIENLTWWTLAQDVPLGTKAGDGQTLQKHAFWARVCGFNAILLMCVNIFFYAYFA

SEQ ID NO: 933 - DNA, 1027 bp, Homo sapiens
  CDS (1)..(939)
atgatctgctcagctatcaacctacacttactactggcagttaagatgattcaccctgtctggattcttgctcctcgggagcaagggctgtttctgctgatttatctggcagtgctggtggggaacctgctcatcattgcagtcatcactctcgatcagcatcttcacacacccatgtacttcttcctgaagaacctctccgttttggatctgtgctacatctcagtcactgtgcctaaatccatccgtaactccctgactcgcagaagctccatctcttatcttggctgtgtggctcaagtctattttttctctgcctttgcatctgctgagctggccttccttactgtcatgtcttatgaccgctatgttgccatttgccaccccctccaatacagagccgtgatgacatcaggagggtgctatcagatggcagtcaccacctggctaagctgcttttcctacgcagccgtccacactggcaacatgtttcgggagcacgtttgcagatccagtgtgatccaccagttcttccgtgacatccctcatgtgttggccctggtttcctgtgaggttttctttgtagagtttttgaccctggccctgagctcatgcttggttctgggatgctttattctcatgatgatctcctatttccaaatcttctcaacggtgctcagaatcccttcaggacagagtcgagcaaaagccttctccacctgctccccccagctcattgtcatcatgctctttcttaccacagggctctttgctgccttaggaccaattgcaaaagctctgtccattcaggatttagtgattgctctgacatacacagttttgcctcccttcctcaatcccatcatatatagtcttaggaataaggagattaaaacagccatgtggagactctttgtgaagatatattttctgcaaaagtagaacatcctggtctttactatagaagatctgcaacaaaaccccaaaaaagcataaatactttatgacaaaaaaagatgaaaaaatt

SEQ ID NO: 934 - protein, 313 aa, Homo sapiens
MICSAINLHLLLAVKMIHPVWILAPREQGLFLLIYLAVLVGNLLIIAVITLDQHLHTPMYFFLKNLSVLDLCYISVTVPKSIRNSLTRRSSISYLGCVAQVYFFSAFASAELAFLTVMSYDRYVAICHPLQYRAVMTSGGCYQMAVTTWLSCFSYAAVHTGNMFREHVCRSSVIHQFFRDIPHVLALVSCEVFFVEFLTLALSSCLVLGCFILMMISYFQIFSTVLRIPSGQSRAKAFSTCSPQLIVIMLFLTTGLFAALGPIAKALSIQDLVIALTYTVLPPFLNPIIYSLRNKEIKTAMWRLFVKIYFLQK

SEQ ID NO: 935 - DNA, 817 bp, Homo sapiens
  CDS (2)..(817)
caccggatccgtcatcactctcgatcagcatcttcacacacccatgtacttcttcctgaagaacctctctgttttggatctgtgctacatctcagtcactgtgcctaaatccatccgtaactccctgactcgcagaagctccatctcttatcttggctgtgtggctcaagtctattttttctctgcctttgcatctgctgagctggccttccttactgtcatgtcttatgaccgctatgttgccatttgccaccccctccaatacagagccgtgatgacatcaggagggtgctatcagatggcagtcaccacctggctaagctgcttttcctacgcagccgtccacactggcaacatgtttcgggagcacgtttgcagatccaatgtgatccaccagttcttccgtgacatccctcatgtgttggccctggtttcctgtgaggttttctttgtagagtttttgaccctggccctgagctcatgcttggttctgggatgctttattctcatgatgatctcctatttccaaatcttctcaacggtgctcagaatcccttcaggacagagtcgagcaaaagccttctccacctgctccccccagctcattgtcatcatgctctttcttaccacagggctctttgctgccttaggaccaattgcaaaagctctgtccattcaggatttagtgattgctctgacatacacagttttgcctcccttcctcaatcccatcatatatagtcttaggaataaggagattaaaacagccatgtggagactctttgtgaagatatattttctgcaaaagctcgagggc

SEQ ID NO: 936 - protein, 272 aa, Homo sapiens
TGSVITLDQHLHTPMYFFLKNLSVLDLCYISVTVPKSIRNSLTRRSSISYLGCVAQVYFFSAFASAELAFLTVMSYDRYVAICHPLQYRAVMTSGGCYQMAVTTWLSCFSYAAVHTGNMFREHVCRSNVIHQFFRDIPHVLALVSCEVFFVEFLTLALSSCLVLGCFILMMISYFQIFSTVLRIPSGQSRAKAFSTCSPQLIVIMLFLTTGLFAALGPIAKALSIQDLVIALTYTVLPPFLNPIIYSLRNKEIKTAMWRLFVKIYFLQKLEG

SEQ ID NO: 937 - DNA, 2422 bp, Homo sapiens
  CDS (51)..(2381)
gaactccttttctcaagcacttctgctctcctctaccagaatcactcagaatgcttcccgggtgtatattcttgatgattttactcattcctcaggttaaagaaaagttcatccttggagtagagggtcaacaactggttcgtcctaaaaagcttcctctgatacagaagcgagatactggacacacccatgatgatgacatactgaaaacgtatgaagaagaattgttgtatgaaataaaactaaatagaaaaaccttagtccttcatcttctaagatccagggagttcctaggctcaaattacagtgaaacattctactccatgaaaggagaagcgttcaccaggcatcctcagatcatggaacactgttactataaaggaaacatcctaaatgaaaagaattctgttgccagcatcagtacttgtgacgggttgaggggattcttcagaataaacgaccaaagatacctcattgaaccagtgaaatactcagatgagggagaacatttggtgttcaaatataacctgagggtgccgtatggtgccaattattcctgtacagagcttaattttaccagaaaaactgttccaggggataatgaatctgaagaagactccaaaataaaaggcatccatgatgaaaagtatgttgaattgttcattgttgctgatgatactgtgtatcgcagaaatggtcatcctcacaataaactaaggaaccgaatttggggaatggtcaattttgtcaacatgatttataaaaccttaaacatccatgtgacgttggttggcattgaaatatggacacatgaagataaaatagaactatattcaaatatagaaactaccttattgcgtttttcattttggcaagaaaagatccttaaaacacggaaggattttgatcatgttgtattactcagtgggaagtggctctactcacatgtgcaaggaatttcttatccagggggtatgtgcctgccctattattccaccagtatcattaaggatcttttacctgacacaaacataattgcaaacagaatggcacatcaactggggcataaccttgggatgcagcatgacgagttcccatgcacctgtccttcaggaaaatgcgtgatggacagtgatggaagcattcctgcactgaaattcagtaaatgcagccaaaaccaataccaccagtacttgaaggattataagccaacatgcatgctcaacattccatttccttacaattttcatgatttccaattttgtggaaacaagaagttggatgagggtgaagagtgtgactgtggccctgctcaggagtgtactaatccttgctgtgatgcacacacatgtgtactgaagccaggatttacttgtgcagaaggagaatgctgtgaatcttgtcagataaaaaaagcagggtccatatgcagaccggcgaaagatgaatgtgattttcctgagatgtgcactggccactcgcctgcctgtcctaaggaccagttcagggtcaatggatttccttgcaagaactcagaaggctactgtttcatggggaaatgtccaactcgtgaggatcagtgctctgaactatttgatgatgaggcaatagagagtcatgatatctgctacaagatgaatacaaaaggaaataaatttggatactgcaaaaacaaggaaaacagatttcttccctgtgaggagaaggatgtcagatgtggaaagatctactgcactggaggggagctttcctctctccttggagaagacaagacttatcaccttaaggatccccagaagaatgctactgtcaaatgcaaaactatttttttataccatgattctacagacattggcctggtggcgtcaggaacaaaatgtggagagggaatggtgtgcaacaatggtgaatgtctaaacatggaaaaggtctatatctcaaccaattgcccctctcagtgcaatgaaaatcctgtggatggccacggactccagtgccactgtgaggaaggacaggcacctgtagcctgtgaagaaaccttacatgttaccagtatcaccatcttggttgttgtgcttgtcctggttattgtcggtatcggagttcttatactattagttcgttaccgaaaatgtatcaagttgaagcaagttcagagcccacctacagaaaccctgggagtggagaacaaaggatactttggtgatgagcagcagataaggactgagccaatcctgccagaaattcatttcctaaatcagagaactccagaatccttggaaagcctgcccactagtttttcaagtccccactacatcacactgaaacctgcaagtaaagattcaagaggaatcgcagatcccaatcaaagtgccaagtggtaggttaccctgacagatagtacctcccttttttatttttc

SEQ ID NO: 938 - protein, 777 aa, Homo sapiens
MLPGCIFLMILLIPQVKEKFILGVEGQQLVRPKKLPLIQKRDTGHTHDDDILKTYEEELLYEIKLNRKTLVLHLLRSREFLGSNYSETFYSMKGEAFTRHPQIMEHCYYKGNILNEKNSVASISTCDGLRGFFRINDQRYLIEPVKYSDEGEHLVFKYNLRVPYGANYSCTELNFTRKTVPGDNESEEDSKIKGIHDEKYVELFIVADDTVYRRNGHPHNKLRNRIWGMVNFVNMIYKTLNIHVTLVGIEIWTHEDKIELYSNIETTLLRFSFWQEKILKTRKDFDHVVLLSGKWLYSHVQGISYPGGMCLPYYSTSIIKDLLPDTNIIANRMAHQLGHNLGMQHDEFPCTCPSGKCVMDSDGSIPALKFSKCSQNQYHQYLKDYKPTCMLNIPFPYNFHDFQFCGNKKLDEGEECDCGPAQECTNPCCDAHTCVLKPGFTCAEGECCESCQIKKAGSICRPAKDECDFPEMCTGHSPACPKDQFRVNGFPCKNSEGYCFMGKCPTREDQCSELFDDEAIESHDICYKMNTKGNKFGYCKNKENRFLPCEEKDVRCGKIYCTGGELSSLLGEDKTYHLKDPQKNATVKCKTIFLYHDSTDIGLVASGTKCGEGMVCNNGECLNMEKVYISTNCPSQCNENPVDGHGLQCHCEEGQAPVACEETLHVTSITILVVVLVLVIVGIGVLILLVRYRKCIKLKQVQSPPTETLGVENKGYFGDEQQIRTEPILPEIHFLNQRTPESLESLPTSFSSPHYITLKPASKDSRGIADPNQSAKW

SEQ ID NO: 939 - DNA, 247 bp, Homo sapiens
  CDS (2)..(247)
caccggtaccgatgagggtgaagagtgtgactgtggccctgctcaggagtgtactaatccttgctgtgatgcacacacatgtgtactgaagccaggatttacttgtgcagaaggagaatgctgtgaatcttgtcagataaaaaaagcagggtccatatgcagaccggcgaaagatgaatgtgattttcctgagatgtgcactggccactcgcctgcctgtcctaaggaccagttcagggtcgacggc

SEQ ID NO: 940 - protein, 82 aa, Homo sapiens
TGTDEGEECDCGPAQECTNPCCDAHTCVLKPGFTCAEGECCESCQIKKAGSICRPAKDECDFPEMCTGHSPACPKDQFRVDG

SEQ ID NO: 941 - DNA, 1268 bp, Homo sapiens
  CDS (71)..(1195)
acttctttcttttctgtttcagagttactgatttattcttgagattcctctactctcgttatctgacctcatggatgaacttcaggatgttcagctcacagagatcaaaccacttctaaatgataagaatggtacaagaaacttccaggactttgactgtcaggaacatgatatagaaacaactcatggtgtggtccacgtcactataagaggcttacccaaaggaaacagaccagttatactaacatatcatgacattggcctcaaccgtaaatcctgtttcaatgcattctttaactttgaggatatgcaagagatcacccagcactttgctgtctgtcatgtggatgccccaggccagcaggaaggtgcaccctctttcccaacagggtatcagtaccccacaatggatgagctggctgaaatgctgcctcctgttcttacccacctaagcctgaaaagcatcattggaattggagttggagctggagcttacatcctcagcagatttgcactcaaccatccagagcttgtggaaggccttgtgctcattaatgttgacccttgcgctaaaggctggattgactgggcagcttccaaactctctggcctgacaaccaatgttgtggacattattttggctcatcactttgggcaggaagagttacaggccaacctggacctgatccaaacctacagaatgcatattgcccaagacatcaaccaagacaacctgcagctcttcttgaattcctacaatgggcgcagagacctggagatcgaaagacccatactgggccaaaatgataacaaatcaaaaacattaaagtgttctactttactggtggtaggggacaattcgcctgcagttgaggctgtggtcgaatgcaattcccgcctgaaccctataaatacaactttgctaaagatggcggactgtgggggactgccccaggtagttcagcctgggaagctcaccgaggccttcaagtactttttgcagggaatgggctacgtcccgtctgccagcatgactcggctcgcccgatcacgaacccactcaacctcgagtagcctcggctctggagaaagtcccttcagccggtctgtcaccagcaatcagtcagatggaactcaagaatcctgtgagtcccctgatgtcctggacagacaccagaccatggaggtgtcctgctaagcagatgctcctcccctggaccattgcaagtccatccttcaaatgaccactccataatataacatttcat

SEQ ID NO: 942 - protein, 375 aa, Homo sapiens
MDELQDVQLTEIKPLLNDKNGTRNFQDFDCQEHDIETTHGVVHVTIRGLPKGNRPVILTYHDIGLNRKSCFNAFFNFEDMQEITQHFAVCHVDAPGQQEGAPSFPTGYQYPTMDELAEMLPPVLTHLSLKSIIGIGVGAGAYILSRFALNHPELVEGLVLINVDPCAKGWIDWAASKLSGLTTNVVDIILAHHFGQEELQANLDLIQTYRMHIAQDINQDNLQLFLNSYNGRRDLEIERPILGQNDNKSKTLKCSTLLVVGDNSPAVEAVVECNSRLNPINTTLLKMADCGGLPQVVQPGKLTEAFKYFLQGMGYVPSASMTRLARSRTHSTSSSLGSGESPFSRSVTSNQSDGTQESCESPDVLDRHQTMEVSC

SEQ ID NO: 943 - DNA, 1041 bp, Homo sapiens
  CDS (120)..(968)
acttctttcttttctgtttcagagttactgatttattcttgagattcctctactctcgttatctgacctcatggatgaacttcaggatgttcagctcacagagatcaaaccacttctaaatgataagaatggtacaagaaacttccaggactttgactgtcaggtatcagtaccccacaatggatgagctggctgaaatgctgcctcctgttcttacccacctaagcctgaaaagcatcattggaattggagttggagctggagcttacatcctcagcagatttgcactcaaccatccagagcttgtggaaggccttgtgctcattaatgttgacccttgcgctaaaggctggattgactgggcagcttccaaactctctggcctgacaaccaatgttgtggacattattttggctcatcactttgggcaggaagagttacaggccaacctggacctgatccaaacctacagaatgcatattgcccaagacatcaaccaagacaacctgcagctcttcttgaattcctacaatgggcgcagagacctggagatcgaaagacccatactgggccaaaatgataacaaatcaaaaacattaaagtgttctactttactggtggtaggggacaattcgcctgcagttgaggctgtggtcgaatgcaattcccgcctgaaccctataaatacaactttgctaaagatggcggactgtgggggactgccccaggtagttcagcctgggaagctcaccgaggccttcaagtactttttgcagggaatgggctacgtcccgtctgccagcatgactcggctcgcccgatcacgaacccactcaacctcgagtagcctcggctctggagaaagtcccttcagccggtctgtcaccagcaatcagtcagatggaactcaagaatcctgtgagtcccctgatgtcctggacagacaccagaccatggaggtgtcctgctaagcagatgctcctcccctggaccattgcaagtccatccttcaaatgaccactccataatataacatttcat

SEQ ID NO: 944 - protein, 283 aa, Homo sapiens
MIRMVQETSRTLTVRYQYPTMDELAEMLPPVLTHLSLKSIIGIGVGAGAYILSRFALNHPELVEGLVLINVDPCAKGWIDWAASKLSGLTTNVVDIILAHHFGQEELQANLDLIQTYRMHIAQDINQDNLQLFLNSYNGRRDLEIERPILGQNDNKSKTLKCSTLLVVGDNSPAVEAVVECNSRLNPINTTLLKMADCGGLPQVVQPGKLTEAFKYFLQGMGYVPSASMTRLARSRTHSTSSSLGSGESPFSRSVTSNQSDGTQESCESPDVLDRHQTMEVSC

SEQ ID NO: 945 - DNA, 994 bp, Homo sapiens
  CDS (2)..(994)
caccaagcttacaagaaacttccaggactttgactgtcaggaacatgatatagaaacaactcatggtgtggtccacgtcactataagaggcttacccaaaggaaacagaccagttatactaacatatcatgacattggcctcaaccataaatcctgtttcaatgcattctttaactttgaggatatgcaagagatcacccagcactttgctgtctgtcatgtggatgccccaggccagcaggaaggtgcaccctctttcccaacagggtatcagtaccccacaatggatgagctggctgaagtgctgcctcctgttcttacccacctaagcctgaaaagcatcattggaattggagttggagctggagcttacatcctcagcagatttgcactcaaccatccagagcttgtggaaggccttgtgctcattaatgttgacccttgcgctaaaggctggattgactgggcagcttccaaactctctggcctgacaaccaatgttgtggacattattttggctcatcactttgggcaggaagagttacaggccaacctggacctgatccaaacctacagaatgcatattgcccaagacatcaaccaagacaacctgcagctcttcttgaattcctacaatggacgcagagacctggagatcgaaagacccatactgggccaaaatgataacaaatcaaaaacattaaagtgttctactttactggtggtaggggacaattcgcctgcagttgaggctgtggtcgaatgcaattcccgcctgaaccctataaatacaactttgctaaagatggcggactgtgggggactgccccaggtagttcagcctgggaagctcaccgaggccttcaagtactttttgcagggaatgggctacataccatctgccagcatgactcggctcgcccgatcacgaacccactcaacctcgagtagcctcggctctggagaaagtcccttcagccggtctgtcgacggc

SEQ ID NO: 946 - protein, 331 aa, Homo sapiens
TKLTRNFQDFDCQEHDIETTHGVVHVTIRGLPKGNRPVILTYHDIGLNHKSCFNAFFNFEDMQEITQHFAVCHVDAPGQQEGAPSFPTGYQYPTMDELAEVLPPVLTHLSLKSIIGIGVGAGAYILSRFALNHPELVEGLVLINVDPCAKGWIDWAASKLSGLTTNVVDIILAHHFGQEELQANLDLIQTYRMHIAQDINQDNLQLFLNSYNGRRDLEIERPILGQNDNKSKTLKCSTLLVVGDNSPAVEAVVECNSRLNPINTTLLKMADCGGLPQVVQPGKLTEAFKYFLQGMGYIPSASMTRLARSRTHSTSSSLGSGESPFSRSVDG

SEQ ID NO: 947 - DNA, 1175 bp, Homo sapiens
  CDS (16)..(1140)
tcgttatctgacctcatggatgaacttcaggatgttcagctcacagagatcaaaccacttctaaatgataagaatggtacaagaaacttccaggactttgactgtcaggaacatgatatagaaacaactcatggtgtggtccacgtcactataagaggcttacccaaaggaaacagaccagttatactaacatatcatgacattggcctcaaccataaatcctgtttcaatgcattctttaactttgaggatatgcaagagatcacccagcactttgctgtctgtcatgtggatgccccaggccagcaggaaggtgcaccctctttcccaacagggtatcagtaccccacaatggatgagctggctgaagtgctgcctcctgttcttacccacctaagcctgaaaagcatcattggaattggagttggagctggagcttacatcctcagcagatttgcactcaaccatccagagcttgtggaaggccttgtgctcattaatgttgacccttgcgctaaaggctggattgactgggcagcttccaaactctctggcctgacaaccaatgttgtggacattattttggctcatcactttgggcaggaagagttacaggccaacctggacctgatccaaacctacagaatgcatattgcccaagacatcaaccaagacaacctgcagctcttcttgaattcctacaatggacgcagagacctggagatcgaaagacccatactgggccaaaatgataacaaatcaaaaacattaaagtgttctactttactggtggtaggggacaattcgcctgcagttgaggctgtggtcgaatgcaattcccgcctgaaccctataaatacaactttgctaaagatggcggactgtgggggactgccccaggtagttcagcctgggaagctcaccgaggccttcaagtactttttgcagggaatgggctacataccatctgccagcatgactcggctcgcccgatcacgaacccactcaacctcgagtagcctcggctctggagaaagtcccttcagccggtctgtcaccagcaatcagtcagatggaactcaagaatcctgtgagtcccctgatgtcctggacagacaccagaccatggaggtgtcctgctaagcagatgctcctcccctggaccattgcaagtc

SEQ ID NO: 948 - protein, 375 aa, Homo sapiens
MDELQDVQLTEIKPLLNDKNGTRNFQDFDCQEHDIETTHGVVHVTIRGLPKGNRPVILTYHDIGLNHKSCFNAFFNFEDMQEITQHFAVCHVDAPGQQEGAPSFPTGYQYPTMDELAEVLPPVLTHLSLKSIIGIGVGAGAYILSRFALNHPELVEGLVLINVDPCAKGWIDWAASKLSGLTTNVVDIILAHHFGQEELQANLDLIQTYRMHIAQDINQDNLQLFLNSYNGRRDLEIERPILGQNDNKSKTLKCSTLLVVGDNSPAVEAVVECNSRLNPINTTLLKMADCGGLPQVVQPGKLTEAFKYFLQGMGYIPSASMTRLARSRTHSTSSSLGSGESPFSRSVTSNQSDGTQESCESPDVLDRHQTMEVSC

SEQ ID NO: 949 - DNA, 1232 bp, Homo sapiens
  CDS (71)..(1159)
acttctttcttttctgtttcagagttactgatttattcttgagattcctctactctcgttatctgacctcatggatgaacttcaggatgttcagctcacagagatcaaaccacttctaaatgataaggaacatgatatagaaacaactcatggtgtggtccacgtcactataagaggcttacccaaaggaaacagaccagttatactaacatatcatgacattggcctcaaccataaatcctgtttcaatgcattctttaactttgaggatatgcaagagatcacccagcactttgctgtctgtcatgtggatgccccaggccagcaggaaggtgcaccctctttcccaacagggtatcagtaccccacaatggatgagctggctgaaatgctgcctcctgttcttacccacctaagcctgaaaagcatcattggaattggagttggagctggagcttacatcctcagcagatttgcactcaaccatccagagcttgtggaaggccttgtgctcattaatgttgacccttgcgctaaaggctggattgactgggcagcttccaaactctctggcctgacaaccaatgttgtggacattattttggctcatcactttgggcaggaagagttacaggccaacctggacctgatccaaacctacagaatgcatattgcccaagacatcaaccaagacaacctgcagctcttcttgaattcctacaatgggcgcagagacctggagatcgaaagacccatactgggccaaaatgataacaaatcaaaaacattaaagtgttctactttactggtggtaggggacaattcgcctgcagttgaggctgtggtcgaatgcaattcccgcctgaaccctataaatacaactttgctaaagatggcggactgtgggggactgccccaggtagttcagcctgggaagctcaccgaggccttcaagtactttttgcagggaatgggctacgtcccgtctgccagcatgactcggctcgcccgatcacgaacccactcaacctcgagtagcctcggctctggagaaagtcccttcagccggtctgtcaccagcaatcagtcagatggaactcaagaatcctgtgagtcccctgatgtcctggacagacaccagaccatggaggtgtcctgctaagcagatgctcctcccctggaccattgcaagtccatccttcaaatgaccactccataatataacatttcat

SEQ ID NO: 950 - protein, 363 aa, Homo sapiens
MDELQDVQLTEIKPLLNDKEHDIETTHGVVHVTIRGLPKGNRPVILTYHDIGLNHKSCFNAFFNFEDMQEITQHFAVCHVDAPGQQEGAPSFPTGYQYPTMDELAEMLPPVLTHLSLKSIIGIGVGAGAYILSRFALNHPELVEGLVLINVDPCAKGWIDWAASKLSGLTTNVVDIILAHHFGQEELQANLDLIQTYRMHIAQDINQDNLQLFLNSYNGRRDLEIERPILGQNDNKSKTLKCSTLLVVGDNSPAVEAVVECNSRLNPINTTLLKMADCGGLPQVVQPGKLTEAFKYFLQGMGYVPSASMTRLARSRTHSTSSSLGSGESPFSRSVTSNQSDGTQESCESPDVLDRHQTMEVSC

SEQ ID NO: 951 - DNA, 1220 bp, Homo sapiens
  CDS (71)..(1147)
acttctttcttttctgtttcagagttactgatttattcttgagattcctctactctcgttatctgacctcatggatgaacttcaggatgttcagctcacagagatcaaaccacttctaaatgataagaatggtacaagaaacttccaggactttgactgtcaggaacatgatatagaaacaactcatggtgtggtccacgtcactataagaggcttacccaaaggaaacagaccagttatactaacatatcatgacattggcctcaaccgtaaatcctgtttcaatgcattctttaactttgaggatatgcaagagatcacccagcactttgctgtctgtcatgtggatgccccaggccagcaggaaggtgcaccctctttcccaacagggtatcagtaccccacaatggatgagctggctgaaatgctgcctcctgttcttacccacctaagcctgaaaagcatcattggaattggagttggagctggagcttacatcctcagcagatttgcactcaaccatccagagcttgtggaaggccttgtgctcattaatgttgacccttgcgctaaaggctggattgactgggcagcttccaaactctctggcctgacaaccaatgttgtggacattattttggctcatcactttgggcaggaagagttacaggccaacctggacctgatccaaacctacagaatgcatattgcccaagacatcaaccaagacaacctgcagctcttcttgaattcctacaatggacgcagagacctggagatcgaaagacccatactgggccaaaatgataacaaatcaaaaacattaaagtgttctactttactggtggtaggggacaattcgcctgcagttgaggctgtgatggcggactgtgggggactgccccaggtagttcagcctgggaagttcaccgaggccttcaagtactttttgcagggaatgggctacacaccatctgccagcatgactcggctcgcccgatcacgaacccactcaacctcgagtagcctcggctctggagaaagtcccttcagccggtctgtcaccagcaatcagtcagatggaactcaagaatcctgtgagtcccctgatgtcctggacagacaccagaccatggaggtgtcctgctaagcagatgctcctcccctggaccattgcaagtccatccttcaaatgaccactccataatataacatttcat

SEQ ID NO: 952 - protein, 359 aa, Homo sapiens
MDELQDVQLTEIKPLLNDKNGTRNFQDFDCQEHDIETTHGVVHVTIRGLPKGNRPVILTYHDIGLNRKSCFNAFFNFEDMQEITQHFAVCHVDAPGQQEGAPSFPTGYQYPTMDELAEMLPPVLTHLSLKSIIGIGVGAGAYILSRFALNHPELVEGLVLINVDPCAKGWIDWAASKLSGLTTNVVDIILAHHFGQEELQANLDLIQTYRMHIAQDINQDNLQLFLNSYNGRRDLEIERPILGQNDNKSKTLKCSTLLVVGDNSPAVEAVMADCGGLPQVVQPGKFTEAFKYFLQGMGYTPSASMTRLARSRTHSTSSSLGSGESPFSRSVTSNQSDGTQESCESPDVLDRHQTMEVSC

SEQ ID NO: 953 - DNA, 970 bp, Homo sapiens
  CDS (1)..(897)
atggatgaacttcaggatgttcagctcacagagatcaaaccacttctaaatgataagaatggtacaagaaacttccaggactttgactgtcagtatcagtaccccacaatggatgagctggctgaaatgctgcctcctgttcttacccacctaagcctgaaaagcatcattggaattggagttggagctggagcttacatcctcagcagatttgcactcaaccatccagagcttgtggaaggccttgtgctcattaatgttgacccttgcgctaaaggctggattgactgggcagcttccaaactctctggcctgacaaccaatgttgtggacattattttggctcatcactttgggcaggaagagttacaggccaacctggacctgatccaaacctacagaatgcatattgcccaagacatcaaccaagacaacctgcagctcttcttgaattcctacaatgggcgcagagacctggagatcgaaagacccatactgggccaaaatgataacaaatcaaaaacattaaagtgttctactttactggtggtaggggacaattcgcctgcagttgaggctgtggtcgaatgcaattcccgcctgaaccctataaatacaactttgctaaagatggcggactgtgggggactgccccaggtagttcagcctgggaagctcaccgaggccttcaagtactttttgcagggaatgggctacgtcccgtctgccagcatgactcggctcgcccgatcacgaacccactcaacctcgagtagcctcggctctggagaaagtcccttcagccggtctgtcaccagcaatcagtcagatggaactcaagaatcctgtgagtcccctgatgtcctggacagacaccagaccatggaggtgtcctgctaagcagatgctcctcccctggaccattgcaagtccatccttcaaatgaccactccataatataacatttcat

SEQ ID NO: 954 - protein, 299 aa, Homo sapiens
MDELQDVQLTEIKPLLNDKNGTRNFQDFDCQYQYPTMDELAEMLPPVLTHLSLKSIIGIGVGAGAYILSRFALNHPELVEGLVLINVDPCAKGWIDWAASKLSGLTTNVVDIILAHHFGQEELQANLDLIQTYRMHIAQDINQDNLQLFLNSYNGRRDLEIERPILGQNDNKSKTLKCSTLLVVGDNSPAVEAVVECNSRLNPINTTLLKMADCGGLPQVVQPGKLTEAFKYFLQGMGYVPSASMTRLARSRTHSTSSSLGSGESPFSRSVTSNQSDGTQESCESPDVLDRHQTMEVSC

SEQ ID NO: 955 - DNA, 2536 bp, Homo sapiens
  CDS (150)..(2093)
gggacactgacatggactgaaggagtagaaaagaagccttgggctctcccagatggaagaatgaccgtgtgaggaaactgtttaacctcaagggcagggaaatcaggagcgtctctgatttcttcagggaaggggatgctttcatagctatgggcaaagaaccactgacactgaagagcattcaggtggctgtagaagaactgtaccccaacaaagcccgggccctgacactggcccagcacagccgtgccccttctccaaggctgaggagcaggctgtttagcaaggctctgaaaggagaccaccgctgtggggagaccgagacccccaagagctgcagcgaagttgcaggatgcaaggcagccatgaggcaccaggggaagatccccgaggagctttcactagatgacagagcgaggacccagaagaagtgggggagggggaaatgggagccagaacccagtagcaagccccccagggaagccactctggaagagaggcacgcaaggggagagaagcatcttggggtggagattgaaaagacctcgggtgaaattatcagatgcgagaagtgcaagagagagagggagcttcagcagagcctggagcgtgagaggctttctctggggaccagtgagctggatatggggaagggcccaatgtatgatgtggagaagctggtgaggaccagaagctgcaggaggtctcccgaggcaaatcctgcaagtggggaggaagggtggaagggtgacagccacaggagcagccccaggaatcccactcaagagctgaggagacccagcaagagcatggacaagaaagaggacagaggcccagaggatcaagaaagccatgctcagggagcagccaaggccaagaaggaccttgtggaagttcttcctgtcacagaggaggggctgagggaggtgaagaaggacaccaggcccatgagcaggagcaaacatggtggctggctcctgagagagcaccaggcgggctttgagaagctccgcaggacccgaggagaagagaaggaggcagagaaggagaaaaagccatgtatgtctggaggcagaaggatgactctcagagatgaccaacctgcaaagctagaaaaggagcccaagacgaggccagaagagaacaagccagagcggcccagcggtcggaagccacggcccatgggcatcattgccgccaatgtggaaaagcattatgagactggccgggtcattggggatgggaactttgctgtcgtgaaggagtgcagacaccgcgagaccaggcaggcctatgcgatgaagatcattgacaagtccagactcaagggcaaggaggacatggtggacagtgagatcttgatcatccagagcctctctcaccccaacatcgtgaaattgcatgaagtctacgaaacagacatggaaatctacctgatcctggagtacgtgcagggaggagacctttttgacgccatcatagaaagtgtgaagttcccggagcccgatgctgccctcatgatcatggacttatgcaaagccctcgtccacatgcacgacaagagcattgtccaccgggacctcaagccggaaaaccttttggttcagcgaaatgaggacaaatctactaccttgaaattggctgattttggacttgcaaagcatgtggtgagacctatatttactgtgtgtgggaccccaacttacgtagctcccgaaattctttctgagaaaggttatggactggaggtggacatgtgggcggctggcgtgatcctctatatcctgctgtgtggctttcccccattccgcagccctgagagggaccaggacgagctctttaacatcatccagctgggccactttgagttcctccccccttactgggacaatatctctgatgctgctaaagatctggtgagccggttgctggtggtagaccccaaaaagcgctacacagctcatcaggttcttcagcacccctggatcgaaacagctggcaagaccaatacagtgaaacgacagaagcaggtgtcccccagcagcgagggtcacttccggagccagcacaagagggttgtggagcaggtatcatagtcaccaccttgggaatctgtccagcccccagttctgctcaaggacagagaaaaggatagaagtttgagagaaaaacaatgaaagaggcttcttcacataattggtgaatcagagggagagacactgagtatattttaaagcatattaaaaaaattaagtcaatgttaaatgtcacaacatatttttagatttgtatatttaaagcctttaatacatttttggggggtaagcattgtcatcagtgaggaattttggtaataatgatgtgttttgcttcccctttgtaaccaagtttattctgtactacaggagtggtgcttaccagggtctaaactccccctgtgagattaataaggtgcattgtggtctttctgtgttaataaaatgtgctctgaataacagaaaaaaaaaaaaaaaaaaaaaaaaaaaaaaaaaaaagg

SEQ ID NO: 956 - protein, 648 aa, Homo sapiens
MGKEPLTLKSIQVAVEELYPNKARALTLAQHSRAPSPRLRSRLFSKALKGDHRCGETETPKSCSEVAGCKAAMRHQGKIPEELSLDDRARTQKKWGRGKWEPEPSSKPPREATLEERHARGEKHLGVEIEKTSGEIIRCEKCKRERELQQSLERERLSLGTSELDMGKGPMYDVEKLVRTRSCRRSPEANPASGEEGWKGDSHRSSPRNPTQELRRPSKSMDKKEDRGPEDQESHAQGAAKAKKDLVEVLPVTEEGLREVKKDTRPMSRSKHGGWLLREHQAGFEKLRRTRGEEKEAEKEKKPCMSGGRRMTLRDDQPAKLEKEPKTRPEENKPERPSGRKPRPMGIIAANVEKHYETGRVIGDGNFAVVKECRHRETRQAYAMKIIDKSRLKGKEDMVDSEILIIQSLSHPNIVKLHEVYETDMEIYLILEYVQGGDLFDAIIESVKFPEPDAALMIMDLCKALVHMHDKSIVHRDLKPENLLVQRNEDKSTTLKLADFGLAKHVVRPIFTVCGTPTYVAPEILSEKGYGLEVDMWAAGVILYILLCGFPPFRSPERDQDELFNIIQLGHFEFLPPYWDNISDAAKDLVSRLLVVDPKKRYTAHQVLQHPWIETAGKTNTVKRQKQVSPSSEGHFRSQHKRVVEQVS

SEQ ID NO: 957 - DNA, 793 bp, Homo sapiens
  CDS (2)..(793)
caccggatcctatgagactggccgggtcattggggatgggaactttgctgtcgtgaaggagtgcagacaccgcgagaccaggcaggcctatgcgatgaagatcattgacaagtccagactcaagggcaaggaggacatggtggacagtgagatcttgatcatccagagcctctctcaccccaacatcgtgaaattgcatgaagtctacgaaacagacatggaaatctacctgatcctggagtacgtgcagggaggagacctttttgacgccatcatagaaagtgtgaagttcccggagcccgatgctgccctcatgatcatggacttatgcaaagccctcgtccacatgcacgacaagagcattgtccaccgggacctcaagccggaaaaccttttggttcagcgaaatgaggacaaatctactaccttgaaattggctgattttggacttgcaaagcatgtggtgagacctatatttactgtgtgtgggaccccaacttacgtagctcccgaaattctttctgagaaaggttatggactggaggtggacatgtgggctgctggcgtgatcctctatatcctgctgtgtggctttcccccattccgcagccctgagagggaccaggacgagctctttaacatcatccagctgggccactttgagttcctccccccttactgggacaatatctctgatgctgctaaagatctggtgagccggttgctggtggtagaccccaaaaagcgctacacagctcatcaggttcttcagcacccctggatcctcgagggc

SEQ ID NO: 958 - protein, 264 aa, Homo sapiens
TGSYETGRVIGDGNFAVVKECRHRETRQAYAMKIIDKSRLKGKEDMVDSEILIIQSLSHPNIVKLHEVYETDMEIYLILEYVQGGDLFDAIIESVKFPEPDAALMIMDLCKALVHMHDKSIVHRDLKPENLLVQRNEDKSTTLKLADFGLAKHVVRPIFTVCGTPTYVAPEILSEKGYGLEVDMWAAGVILYILLCGFPPFRSPERDQDELFNIIQLGHFEFLPPYWDNISDAAKDLVSRLLVVDPKKRYTAHQVLQHPWILEG

SEQ ID NO: 959 - DNA, 625 bp, Homo sapiens
  CDS (2)..(625)
caccggatcctatgagactggccgggtcattggggatgggaactttgctgtcgtgaaggagtgcagacaccgcgagaccaggcaggcctatgcgatgaagatcattgacaagtccagactcaagggcaaggaggacatggtggacagtgagatcttgatcatccagagcctctctcaccccaacatcgtgaaattgcatgaagtctacgaaacagacatggaaatctacctgatcctggagtacgtgcagggaggagacctttttgacgccatcatagaaagtgtgaagttcccggagcccgatgctgccctcatgatcatggacttatgcaaagccctcgtccacatgcacgacaagagcattgtccaccgggacctcaagccggaaaaccttttggttcagcgaaatgaggacaaatctactaccttgaaattggctgattttggacttgcaaagcatgtggtgagacctatatttactgtgtgtgggaccccaacttacgtagctcccgaaattctttctgagaaagctgctaaagatctggtgagccggttgctggtggtagaccccaaaaagcgctacacagctcatcaggttcttcagcacccctggatcctcgagggc

SEQ ID NO: 960 - protein, 208 aa, Homo sapiens
TGSYETGRVIGDGNFAVVKECRHRETRQAYAMKIIDKSRLKGKEDMVDSEILIIQSLSHPNIVKLHEVYETDMEIYLILEYVQGGDLFDAIIESVKFPEPDAALMIMDLCKALVHMHDKSIVHRDLKPENLLVQRNEDKSTTLKLADFGLAKHVVRPIFTVCGTPTYVAPEILSEKAAKDLVSRLLVVDPKKRYTAHQVLQHPWILEG

SEQ ID NO: 961 - DNA, 2133 bp, Homo sapiens
  CDS (90)..(2033)
ttgaccgtgtgaggaaactgtttaacctcaagggcagggaaatcaggagcgtctctgatttcttcagggaaggggatgctttcatagctatgggcaaagaaccactgacactgaagagcattcaggtggctgtagaagaactgtaccccaacaaagcccgggccctgacactggcccagcacagccgtgccccttctccaaggctgaggagcaggctgtttagcaaggctctgaaaggagaccaccgctgtggggagaccgagacccccaagagctgcagcgaagttgcaggatgcaaggcagccatgaggcaccaggggaagatccccgaggagctttcactagatgacagagcgaggacccagaagaagtgggggagggggaaatgggagccagaacccagtagcaagccccccagggaagccactctggaagagaggcacgcaaggggagagaagcatcttggggtggagattgaaaagacctcgggtgaaattatcagatgcgagaagtgcaagagagagagggagctccagcagagcctggagcgtgagaggctttctctggggaccagtgagctggatatggggaagggcccaatgtatgatgtggagaagctggtgaggaccagaagctgcaggaggtctcccgaggcaaatcctgcaagtggggaggaagggtggaagggtgacagccacaggagcagccccaggaatcccactcaagagctgaggagacccagcaagagcatggacaagaaagaggacagaggcccagaggatcaagaaagccatgctcagggagcggccaaggccaagaaggaccttgtggaagttcttcctgtcacagaggaggggctgagagaggtgaagaaggacaccaggcccatgagcaggagcaaacatggtggctggctcctgagagagcaccaggcgggctttgagaagctccgcaggacccgaggagaagagaaggaggcagagaaggagaaaaagccatgtatgtctggaggcagaaggatgactctcagagacgaccaacctgcaaagctagaaaaggagcccaagacgaggccagaagagaacaagccagagcggcccagcggtcggaagccacggcccatgggcatcattgccgccaatgtggaaaagcattatgagactggccgggtcattggggatgggaactttgctgtcgtgaaggagtgcagacaccgcgagaccaggcaggcctatgcgatgaagatcattgacaagtccagactcaagggcaaggaggacatggtggacagtgagatcttgatcatccagagcctctctcaccccaacatcgtgaaattgcatgaagtctacgaaacagacatggaaatctacctgatcctggagtacgtgcagggaggagacctttttgacgccatcatagaaagtgtgaagttcccggagcccgatgctgccctcatgatcatggacttatgcaaagccctcgtccacatgcacgacaagagcattgtccaccgggacctcaagccggaaaaccttttggttcagcgaaatgaggacaaatctactaccttgaaattggctgattttggacttgcaaagcatgtggtgagacctatatttactgtgtgtgggaccccaacttacgtagctcccgaaattctttctgagaaaggttatggactggaggtggacatgtgggctgctggcgtgatcctctatatcctgctgtgtggctttcccccattccgcagccctgagagggaccaggacgagctctttaacatcatccagctgggccactttgagttcctccccccttactgggacaatatctctgatgctgctaaagatctggtgagccggttgctggtggtagaccccaaaaagcgctacacagctcatcaggttcttcagcacccctggatcgaaacagctggcaagaccaatacagtgaaacgacagaagcaggtgtcccccagcagcgagggtcacttccggagccagcacaagagggttgtggagcaggtatcatagtcaccaccttgggaatctgtccagcccccagttctgctcaaggacagagaaaaggatagaagtttgagagaaaaacaatgaaagaggcttcttcaca

SEQ ID NO: 962 - protein, 648 aa, Homo sapiens; identical to SEQ ID NO: 956

SEQ ID NO: 963 - DNA, 1966 bp, Homo sapiens
  CDS (2)..(1966)
caccggatccaccatgggcaaagaaccactgacactgaagagcattcaggtggctgtagaagaactgtaccccaacaaagcccgggccctgacactggcccagcacagccgtgccccttctccaaggctgaggagcaggctgtttagcaaggctctgaaaggagaccaccgctgtggggagaccgagacccccaagagctgcagcgaagttgcaggatgcaaggcagccatgaggcaccaggggaagatccccgaggagctttcactagatgacagagcgaggacccagaagaagtgggggagggggaaatgggagccagaacccagtagcaagccccccagggaagccactctggaagagaggcacgcaaggggagagaagcatcttggggtggagattgaaaagacctcgggtgaaattatcagatgcgagaagtgcaagagagagagggagctccagcagagcctggagcgtgagaggctttctctggggaccagtgagctggatatggggaagggcccaatgtatgatgtggagaagctggtgaggaccagaagctgcaggaggtctcccgaggcaaatcctgcaagtggggaggaagggtggaagggtgacagccacaggagcagccccaggaatcccactcaagagctgaggagacccagcaagagcatggacaagaaagaggacagaggcccagaggatcaagaaagccatgctcagggagcggccaaggccaagaaggaccttgtggaagttcttcctgtcacagaggaggggctgagagaggtgaagaaggacaccaggcccatgagcaggagcaaacatggtggctggctcctgagagagcaccaggcgggctttgagaagctccgcaggacccgaggagaagagaaggaggcagagaaggagaaaaagccatgtatgtctggaggcagaaggatgactctcagagacgaccaacctgcaaagctagaaaaggagcccaagacgaggccagaagagaacaagccagagcggcccagcggtcggaagccacggcccatgggcatcattgccgccaatgtggaaaagcattatgagactggccgggtcattggggatgggaactttgctgtcgtgaaggagtgcagacaccgcgagaccaggcaggcctatgcgatgaagatcattgacaagtccagactcaagggcaaggaggacatggtggacagtgagatcttgatcatccagagcctctctcaccccaacatcgtgaaattgcatgaagtctacgaaacagacatggaaatctacctgatcctggagtacgtgcagggaggagacctttttgacgccatcatagaaagtgtgaagttcccggagcccgatgctgccctcatgatcatggacttatgcaaagccctcgtccacatgcacgacaagagcattgtccaccgggacctcaagccggaaaaccttttggttcagcgaaatgaggacaaatctactaccttgaaattggctgattttggacttgcaaagcatgtggtgagacctatatttactgtgtgtgggaccccaacttacgtagctcccgaaattctttctgagaaaggttatggactggaggtggacatgtgggctgctggcgtgatcctctatatcctgctgtgtggctttcccccattccgcagccctgagagggaccaggacgagctctttaacatcatccagctgggccactttgagttcctccccccttactgggacaatatctctgatgctgctaaagatctggtgagccggttgctggtggtagaccccaaaaagcgctacacagctcatcaggttcttcagcacccctggatcgaaacagctggcaagaccaatacagtgaaacgacagaagcaggtgtcccccagcagcgagggtcacttccggagccagcacaagagggttgtggagcaggtatcactcgagggc

SEQ ID NO: 964 - protein, 655 aa, Homo sapiens
TGSTMGKEPLTLKSIQVAVEELYPNKARALTLAQHSRAPSPRLRSRLFSKALKGDHRCGETETPKSCSEVAGCKAAMRHQGKIPEELSLDDRARTQKKWGRGKWEPEPSSKPPREATLEERHARGEKHLGVEIEKTSGEIIRCEKCKRERELQQSLERERLSLGTSELDMGKGPMYDVEKLVRTRSCRRSPEANPASGEEGWKGDSHRSSPRNPTQELRRPSKSMDKKEDRGPEDQESHAQGAAKAKKDLVEVLPVTEEGLREVKKDTRPMSRSKHGGWLLREHQAGFEKLRRTRGEEKEAEKEKKPCMSGGRRMTLRDDQPAKLEKEPKTRPEENKPERPSGRKPRPMGIIAANVEKHYETGRVIGDGNFAVVKECRHRETRQAYAMKIIDKSRLKGKEDMVDSEILIIQSLSHPNIVKLHEVYETDMEIYLILEYVQGGDLFDAIIESVKFPEPDAALMIMDLCKALVHMHDKSIVHRDLKPENLLVQRNEDKSTTLKLADFGLAKHVVRPIFTVCGTPTYVAPEILSEKGYGLEVDMWAAGVILYILLCGFPPFRSPERDQDELFNIIQLGHFEFLPPYWDNISDAAKDLVSRLLVVDPKKRYTAHQVLQHPWIETAGKTNTVKRQKQVSPSSEGHFRSQHKRVVEQVSLEG

SEQ ID NO: 965 - DNA, 1621 bp, Homo sapiens
  CDS (2)..(1621)
caccggatccaccatgggcaaagaaccactgacactgaagagcattcaggtggctgtagaagaactgtaccccaacaaagcccgggccctgacactggcccagcacagccgtgccccttctccaaggctgaggagcaggctgtttagcaaggctctgaaaggagaccaccgctgtggggagaccgagacccccaagagctgcagcgaagttgcaggatgcaaggcagccatgaggcaccaggggaagatccccgaggagctttcactagatgacagagcgaggacccagaagaagtgggggagggggaaatgggagccagaacccagtagcaagccccccagggaagccactctggaagagaggcacgcaaggggagagaagcatcttggggtggagattgaaaagacctcgggtgaaattatcagatgcgagaagtgcaagagagagagggagctccagcagagcctggagcgtgagaggctttctctggggaccagtgagctggatatggggaagggcccaatgtatgatgtggagaagctggtgaggaccagaagctgcaggaggtctcccgaggcaaatcctgcaagtggggaggaagggtggaagggtgacagccacaggagcagccccaggaatcccactcaagagctgaggagacccagcaagagcatggacaagaaagaggacagaggcccagaggatcaagaaagccatgctcagggagcggccaaggccaagaaggaccttgtggaagttcttcctgtcacagaggaggggctgagagaggtgaagaaggacaccaggcccatgagcaggagcaaacatggtggctggctcctgagagagcaccaggcgggctttgagaagctccgcaggacccgaggagaagagaaggaggcagagaaggagaaaaagccatgtatgtctggaggcagaaggatgactctcagagacgaccaacctgcaaagctagaaaaggagcccaagacgaggccagaagagaacaagccagagcggcccagcggtcggaagccacggcccatgggcatcattgccgccaatgtggaaaagcattatgagactggccgggtcattggggatgggaactttgctgtcgtgaaggagtgcagacaccgcgagaccaggcaggcctatgcgatgaagatcattgacaagtccagactcaagggcaaggaggacatggtggacagtgagatcttgatcatccagagcctctctcaccccaacatcgtgaaattgcatgaagtctacgaaacagacatggaaatctacctgatcctggagtacgtgcagggaggagacctttttgacgccatcatagaaagtgtgaagttcccggagcccgatgctgccctcatgatcatggacttatgcaaagccctcgtccacatgcacgacaagagcattgtccaccgggacctcaagccggaaaaccttttggttcagcgaaatgaggacaaatctactaccttgaaattggctgattttggacttgcaaagcatgtggtgagacctatatttactgtgtgtgggaccccaacttacgtagctcccgaaattctttctgagaaaggttatggactggagctcgagggc

SEQ ID NO: 966 - protein, 540 aa, Homo sapiens
TGSTMGKEPLTLKSIQVAVEELYPNKARALTLAQHSRAPSPRLRSRLFSKALKGDHRCGETETPKSCSEVAGCKAAMRHQGKIPEELSLDDRARTQKKWGRGKWEPEPSSKPPREATLEERHARGEKHLGVEIEKTSGEIIRCEKCKRERELQQSLERERLSLGTSELDMGKGPMYDVEKLVRTRSCRRSPEANPASGEEGWKGDSHRSSPRNPTQELRRPSKSMDKKEDRGPEDQESHAQGAAKAKKDLVEVLPVTEEGLREVKKDTRPMSRSKHGGWLLREHQAGFEKLRRTRGEEKEAEKEKKPCMSGGRRMTLRDDQPAKLEKEPKTRPEENKPERPSGRKPRPMGIIAANVEKHYETGRVIGDGNFAVVKECRHRETRQAYAMKIIDKSRLKGKEDMVDSEILIIQSLSHPNIVKLHEVYETDMEIYLILEYVQGGDLFDAIIESVKFPEPDAALMIMDLCKALVHMHDKSIVHRDLKPENLLVQRNEDKSTTLKLADFGLAKHVVRPIFTVCGTPTYVAPEILSEKGYGLELEG

SEQ ID NO: 967 - DNA, 793 bp, Homo sapiens
  CDS (1)..(792)
accggatcctatgagactggccgggtcattggggatgggaactttgctgtcgtgaaggagtgcagacaccgcgagaccaggcaggcctatgcgatgaagatcattgacaagtccagactcaagggcaaggaggacatggtggacagtgagatcttgatcatccagagcctctctcaccccaacatcgtgaaattgcatgaagtctacgaaacagacatggaaatctacctgatcctggagtacgtgcagggaggagacctttttgacgccatcatagaaagtgtgaagttcccggagcccgatgctgccctcatgatcatggacttatgcaaagccctcgtccacatgcacgacaagagcattgtccaccgggacctcaagccggaaaaccttttggttcagcgaaatgaggacaaatctactaccttgaaattggctgattttggacttgcaaagcatgtggtgagacctatatttactgtgtgtgggaccccaacttacgtagctcccgaaattctttctgagaaaggttatggactggaggtggacatgtgggctgctggcgtgatcctctatatcctgctgtgtggctttcccccattccgcagccctgagagggaccaggacgagctctttaacatcatccagctgggccactttgagttcctccccccttactgggacaatatctctgatgctgctaaagatctggtgagccggttgctggtggtagaccccaaaaagcgctacacagctcatcaggttcttcagcacccctggatcctcgagggcc

SEQ ID NO: 968 - protein, 264 aa, Homo sapiens; identical to SEQ ID NO: 958

SEQ ID NO: 969 - DNA, 2808 bp, Homo sapiens
  CDS (151)..(2658)
tttacagagtcaggcctcaccgtgagagggctcctgtattagtcccttttcatgctgcttatagagacatacctgagactgggcaatttgcagagaaaggttttcttggacttacagttagttccacgtggctggggaagcctcacaatcatggcggaaggcaaggaagggcaagtcccatcttacatggatggcagcaggcaaagagagaatgaggaagatgcaaaagcggaaacccctgatgtaaccatcagatcttatgagatttattcactaccatggaacagacagcaaggcgtatgtgaccattctctagaatatttaagctcgagaatctcagagcggaagctgcaaggctcctggctgcctgccagccgagggaatctggagaaaccattcctggggccgcgtggccccgtcgtgcccttgttctgccctcggaatggccttcactcagcacatcctgagaacagccctctgaagcccagggtcgtgaccgtagtgaagctgggtgggcagcgcccccgaaagatcactctgctcctcaacaggcgatcagtgcagacgttcgagcagctcttagctgacatctcagaagccttgggctctcccagatggaagaatgaccgtgtgaggaaactgtttaacctcaagggcagggaaatcaggagcgtctctgatttcttcagggaaggggatgctttcatagctatgggcaaagaaccactgacactgaagagcattcaggtggctgtagaagaactgtaccccaacaaagcccgggccctgacactggcccagcacagccgtgccccttctccaaggctgaggagcaggctgtttagcaaggctctgaaaggagaccaccgctgtggggagaccgagacccccaagagctgcagcgaagttgcaggatgcaaggcagccatgaggcaccaggggaagatccccgaggagctttcactagatgacagagcgaggacccagaagaagtgggggagggggaaatgggagccagaacccagtagcaagccccccagggaagccactctggaagagaggcacgcaaggggagagaagcatcttggggtggagattgaaaagacctcgggtgaaattatcagatgcgagaagtgcaagagagagagggagctccagcagagcctggagcgtgagaggctttctctggggaccagtgagctggatatggggaagggcccaatgtatgatgtggagaagctggtgaggaccagaagctgcaggaggtctcccgaggcaaatcctgcaagtggggaggaagggtggaagggtgacagccacaggagcagccccaggaatcccactcaagagctgaggagacccagcaagagcatggacaagaaagaggacagaggcccagaggatcaagaaagccatgctcagggagcagccaaggccaagaaggaccttgtggaagttcttcctgtcacagaggaggggctgagggaggtgaagaaggacaccaggcccatgagcaggagcaaacatggtggctggctcctgagagagcaccaggcgggctttgagaagctccgcaggacccgaggagaagagaaggaggcagagaaggagaaaaagccatgtatgtctggaggcagaaggatgactctcagagatgaccaacctgcaaagctagaaaaggagcccaagacgaggccagaagagaacaagccagagcggcccagcggtcggaagccacggcccatgggcatcattgccgccaatgtggaaaagcattatgagactggccgggtcattggggatgggaactttgctgtcgtgaaggagtgcagacaccgcgagaccaggcaggcctatgcgatgaagatcattgacaagtccagactcaagggcaaggaggacatggtggacagtgagatcttgatcatccagagcctctctcaccccaacatcgtgaaattgcatgaagtctacgaaacagacatggaaatctacctgatcctggagtacgtgcagggaggagacctttttgacgccatcatagaaagtgtgaagttcccggagcccgatgctgccctcatgatcatggacttatgcaaagccctcgtccacatgcacgacaagagcattgtccaccgggacctcaagccggaaaaccttttggttcagcgaaatgaggacaaatctactaccttgaaattggctgattttggacttgcaaagcatgtggtgagacctatatttactgtgtgtgggaccccaacttacgtagctcccgaaattctttctgagaaaggttatggactggaggtggacatgtgggctgctggcgtgatcctctatatcctgctgtgtggctttcccccattccgcagccctgagagggaccaggacgagctctttaacatcatccagctgggccactttgagttcctccccccttactgggacaatatctctgatacagctgctaaagatctggtgagccggttgctggtggtagaccccaaaaagcgctacacagctcatcaggttcttcagcacccctggatcgaaacagctggcaagaccaatacagtgaaacgacagaagcaggtgtcccccagcagcgagggtcacttccggagccagcacaagagggttgtggagcaggtatcatagtcaccaccttgggaatctgtccagcccccagttctgctcaaggacagagaaaaggatagaagtttgagagaaaaacaatgaaagaggcttcttcacataattggtgaatcagagggagagacactgagtatattttaaagcatatta

SEQ ID NO: 970 - protein, 836 aa, Homo sapiens
MAEGKEGQVPSYMDGSRQRENEEDAKAETPDVTIRSYEIYSLPWNRQQGVCDHSLEYLSSRISERKLQGSWLPASRGNLEKPFLGPRGPVVPLFCPRNGLHSAHPENSPLKPRVVTVVKLGGQRPRKITLLLNRRSVQTFEQLLADISEALGSPRWKNDRVRKLFNLKGREIRSVSDFFREGDAFIAMGKEPLTLKSIQVAVEELYPNKARALTLAQHSRAPSPRLRSRLFSKALKGDHRCGETETPKSCSEVAGCKAAMRHQGKIPEELSLDDRARTQKKWGRGKWEPEPSSKPPREATLEERHARGEKHLGVEIEKTSGEIIRCEKCKRERELQQSLERERLSLGTSELDMGKGPMYDVEKLVRTRSCRRSPEANPASGEEGWKGDSHRSSPRNPTQELRRPSKSMDKKEDRGPEDQESHAQGAAKAKKDLVEVLPVTEEGLREVKKDTRPMSRSKHGGWLLREHQAGFEKLRRTRGEEKEAEKEKKPCMSGGRRMTLRDDQPAKLEKEPKTRPEENKPERPSGRKPRPMGIIAANVEKHYETGRVIGDGNFAVVKECRHRETRQAYAMKIIDKSRLKGKEDMVDSEILIIQSLSHPNIVKLHEVYETDMEIYLILEYVQGGDLFDAIIESVKFPEPDAALMIMDLCKALVHMHDKSIVHRDLKPENLLVQRNEDKSTTLKLADFGLAKHVVRPIFTVCGTPTYVAPEILSEKGYGLEVDMWAAGVILYILLCGFPPFRSPERDQDELFNIIQLGHFEFLPPYWDNISDTAAKDLVSRLLVVDPKKRYTAHQVLQHPWIETAGKTNTVKRQKQVSPSSEGHFRSQHKRVVEQVS

SEQ ID NO: 971 - DNA, 3016 bp, Homo sapiens
  CDS (52)..(2616)
tttacagagtcaggcctcaccgtgagagggctcctgtattagtcccttttcatgctgcttatagagacatacctgagactgggcaatttgcagagaaaggttttcttggacttacagttagttccacgtggctggggaagcctcacaatcatggcggaaggcaaggaagggcaagtcccatcttacatggatggcagcaggcaaagagagaatgaggaagatgcaaaagcggaaacccctgatgtaaccatcagatcttatgagatttattcactaccatggaacagacagcaaggcgtatgtgaccattctctagaatatttaagctcgagaatctcagagcggaagctgcaaggctcctggctgcctgccagccgagggaatctggagaaaccattcctggggccgcgtggccccgtcgtgcccttgttctgccctcggaatggccttcactcagcacatcctgagaacagccctctgaagcccagggtcgtgaccgtagtgaagctgggtgggcagcgcccccgaaagatcactctgctcctcaacaggcgatcagtgcagacgttcgagcagctcttagctgacatctcagaagccttgggctctcccagatggaagaatgaccgtgtgaggaaactgtttaacctcaagggcagggaaatcaggagcgtctctgatttcttcagggaaggggatgctttcatagctatgggcaaagaaccactgacactgaagagcattcaggtggctgtagaagaactgtaccccaacaaagcccgggccctgacactggcccagcacagccgtgccccttctccaaggctgaggagcaggctgtttagcaaggctctgaaaggagaccaccgctgtggggagaccgagacccccaagagctgcagcgaagttgcaggatgcaaggcagctatgaggcaccaggggaagatccccgaggagctttcactagatgacagagcgaggacccagaagaagtgggggagggggaaatgggagccagaacccagtagcaagccccccagggaagccactctggaagagaggcacgcaaggggagagaagcatcttggggtggagattgaaaagacctcgggtgaaattatcagatgcgagaagtgcaagagagagagggagcttcagcagagcctggagcgtgagaggctttctctggggaccagtgagctggatatggggaagggcccaatgtatgatgtggagaagctggtgaggaccagaagctgcaggaggtctcccgaggcaaatcctgcaagtggggaggaagggtggaagggtgacagccacaggagcagccccaggaatcccactcaagagctgaggagacccagcaagagcatggacaagaaagaggacagaggcccagaggatcaagaaagccatgctcagggagcagccaaggccaagaaggaccttgtggaagttcttcctgtcacagaggaggggctgagggaggtgaagaaggacaccaggcccatgagcaggagcaaacatggtggctggctcctgagagagcaccaggcgggctttgagaagctccgcaggacccgaggagaagagaaggaggcagagaaggagaaaaagccatgtatgtctggaggcagaaggatgactctcagagatgaccaacctgcaaagctagaaaaggagcccaagacgaggccagaagagaacaagccagagcggcccagcggtcggaagccacggcccatgggcatcattgccgccaatgtggaaaagcattatgagactggccgggtcattggggatgggaactttgctgtcgtgaaggagtgcagacaccgcgagaccaggcaggcctatgcgatgaagatcattgacaagtccagactcaagggcaaggaggacatggtggacagtgagatcttgcatgaagtctacgaaacagacatggaaatctacctgatcctggagtacgtgcagggaggagacctttttgacgccatcatagaaagtgtgaagttcccggagcccgatgctgccctcatgatcatggacttatgcaaagccctcgtccacatgcacgacaagagcattgtccaccgggacctcaagccggaaaaccttttggttcagcgaaatgaggacaaatctactaccttgaaattggctgattttggacttgcaaagcatgtggtgagacctatatttactgtgtgtgggaccccaacttacgtagctcccgaaattctttctgagaaaggttatggactggaggtggacatgtgggctgctggcgtgatcctctatatcctgctgtgtggctttcccccattccgcagccctgagagggaccaggacgagctctttaacatcatccagctgggccactttgagttcctccccccttactgggacaatatctctgatgctgctaaagatctggtgagccggttgctggtggtagaccccaaaaagcgctacacagctcatcaggttcttcagcacccctggatcgaaacagctggcaagaccaatacagtgaaacgacagaagcaggtgtcccccagcagcgagggtcacttccggagccagcacaagagggttgtggagcaggtatcatagtcaccaccttgggaatctgtccagcccccagttctgctcaaggacagagaaaaggatagaagtttgagagaaaaacaatgaaagaggcttcttcacataattggtgaatcagagggagagacactgagtatattttaaagcatattaaaaaaattaagtcaatgttaaatgtcacaacatatttttagatttgtatatttaaagcctttaatacatttttggggggtaagcattgtcatcagtgaggaattttggtaataatgatgtgttttgcttcccctttgtaaccaagtttattctgtactacaggagtggtgcttaccagggtctaaactccccctgtgagattaataaggtgcactgtggtctttctgtgttaataaaatgtgctctgaat

SEQ ID NO: 972 - protein, 855 aa, Homo sapiens
MLLIETYLRLGNLQRKVFLDLQLVPRGWGSLTIMAEGKEGQVPSYMDGSRQRENEEDAKAETPDVTIRSYEIYSLPWNRQQGVCDHSLEYLSSRISERKLQGSWLPASRGNLEKPFLGPRGPVVPLFCPRNGLHSAHPENSPLKPRVVTVVKLGGQRPRKITLLLNRRSVQTFEQLLADISEALGSPRWKNDRVRKLFNLKGREIRSVSDFFREGDAFIAMGKEPLTLKSIQVAVEELYPNKARALTLAQHSRAPSPRLRSRLFSKALKGDHRCGETETPKSCSEVAGCKAAMRHQGKIPEELSLDDRARTQKKWGRGKWEPEPSSKPPREATLEERHARGEKHLGVEIEKTSGEIIRCEKCKRERELQQSLERERLSLGTSELDMGKGPMYDVEKLVRTRSCRRSPEANPASGEEGWKGDSHRSSPRNPTQELRRPSKSMDKKEDRGPEDQESHAQGAAKAKKDLVEVLPVTEEGLREVKKDTRPMSRSKHGGWLLREHQAGFEKLRRTRGEEKEAEKEKKPCMSGGRRMTLRDDQPAKLEKEPKTRPEENKPERPSGRKPRPMGIIAANVEKHYETGRVIGDGNFAVVKECRHRETRQAYAMKIIDKSRLKGKEDMVDSEILHEVYETDMEIYLILEYVQGGDLFDAIIESVKFPEPDAALMIMDLCKALVHMHDKSIVHRDLKPENLLVQRNEDKSTTLKLADFGLAKHVVRPIFTVCGTPTYVAPEILSEKGYGLEVDMWAAGVILYILLCGFPPFRSPERDQDELFNIIQLGHFEFLPPYWDNISDAAKDLVSRLLVVDPKKRYTAHQVLQHPWIETAGKTNTVKRQKQVSPSSEGHFRSQHKRVVEQVS

SEQ ID NO: 973 - DNA, 2433 bp, Homo sapiens
  CDS (52)..(2283)
tttacagagtcaggcctcaccgtgagagggctcctgtattagtcccttttcatgctgcttatagagacatacctgagactgggcaatttgcagagaaaggttttcttggacttacagttagttccacgtggctggggaagcctcacaatcatggcggaaggcaaggaagggcaagtcccatcttacatggatggcagcaggcaaagagagaatgaggaagatgcaaaagcggaaacccctgatgtaaccatcagatcttatgagatttattcactaccatggaacagacagcaaggcgtatgtgaccattctctagaatatttaagctcgagaatctcagagcggaagctgcaaggctcctggctgcctgccagccgagggaatctggagaaaccattcctggggccgcgtggccccgtcgtgcccttgttctgccctcggaatggccttcactcagcacatcctgagaacagccctctgaagcccagggtcgtgaccgtagtgaagctgggtgggcagcgcccccgaaagatcactctgctcctcaacaggcgatcagtgcagacgttcgagcagctcttagctgacatctcagaagccttgggctctcccagatggaagaatgaccgtgtgaggaaactgtttaacctcaagggcagggaaatcaggagcgtctctgatttcttcagggaaggggatgctttcatagctatgggcaaagaaccactgacactgaagagcattcaggtggctgtagaagaactgtaccccaacaaagcccgggccctgacactggcccagcacagccgtgccccttctccaaggctgaggagcaggctgtttagcaaggctctgaaaggagaccaccgctgtggggagaccgagacccccaagagctgcagcgaagttgcaggatgcaaggcagccatgaggcaccaggggaagatccccgaggagctttcactagatgacagagcgaggacccagaagaagtgggggagggggaaatgggagccagaacccagtagcaagccccccagggaagccactctggaagagaggcacgcaaggggagagaagcatcttggggtggagattgaaaagacctcgggtgaaattatcagatgcgagaagtgcaagagagagagggagctccagcagagcctggagcgtgagaggctttctctggggaccagtgagctggatatggggaagggcccaatgtatgatgtggagaaaaagccatgtatgtctggaggcagaaggatgactctcagagatgaccaacctgcaaagctagaaaaggagcccaagacgaggccagaagagaacaagccagagcggcccagcggtcggaagccacggcccatgggcatcattgccgccaatgtggaaaagcattatgagactggccgggtcattggggatgggaactttgctgtcgtgaaggagtgcagacaccgcgagaccaggcaggcctatgcgatgaagatcattgacaagtccagactcaagggcaaggaggacatggtggacagtgagatcttgatcatccagagcctctctcaccccaacatcgtgaaattgcatgaagtttacgaaacagacatggaaatctacctgatcctggagtacgtgcagggaggagacctttttgacgccatcatagaaagtgtgaagttcccggagcccgatgctgccctcatgatcatggacttatgcaaagccctcgtccacatgcacgacaagagcattgtccaccgggacctcaagccggaaaaccttttggttcagcgaaatgaggacaaatctactaccttgaaattggctgattttggacttgcaaagcatgtggtgagacctatatttactgtgtgtgggaccccaacttacgtagctcccgaaattctttctgagaaaggttatggactggaggtggacatgtgggctgctggcgtgatcctctatatcctgctgtgtggctttcccccattccgcagccctgagagggaccaggacgagctctttaacatcatccagctgggccactttgagttcctccccccttactgggacaatatctctgatacagctgctaaagatctggtgagccggttgctggtggtagaccccaaaaagcgctacacagctcatcaggttcttcagcacccctggatcgaaacagctggcaagaccaatacagtgaaacgacagaagcaggtgtcccccagcagcgagggtcacttccggagccagcacaagagggttgtggagcaggtatcatagtcaccaccttgggaatctgtccagcccccagttctgctcaaggacagagaaaaggatagaagtttgagagaaaaacaatgaaagaggcttcttcacataattggtgaatcagagggagagacactgagtatattttaaagcatatta

SEQ ID NO: 974 - protein, 744 aa, Homo sapiens
MLLIETYLRLGNLQRKVFLDLQLVPRGWGSLTIMAEGKEGQVPSYMDGSRQRENEEDAKAETPDVTIRSYEIYSLPWNRQQGVCDHSLEYLSSRISERKLQGSWLPASRGNLEKPFLGPRGPVVPLFCPRNGLHSAHPENSPLKPRVVTVVKLGGQRPRKITLLLNRRSVQTFEQLLADISEALGSPRWKNDRVRKLFNLKGREIRSVSDFFREGDAFIAMGKEPLTLKSIQVAVEELYPNKARALTLAQHSRAPSPRLRSRLFSKALKGDHRCGETETPKSCSEVAGCKAAMRHQGKIPEELSLDDRARTQKKWGRGKWEPEPSSKPPREATLEERHARGEKHLGVEIEKTSGEIIRCEKCKRERELQQSLERERLSLGTSELDMGKGPMYDVEKKPCMSGGRRMTLRDDQPAKLEKEPKTRPEENKPERPSGRKPRPMGIIAANVEKHYETGRVIGDGNFAVVKECRHRETRQAYAMKIIDKSRLKGKEDMVDSEILIIQSLSHPNIVKLHEVYETDMEIYLILEYVQGGDLFDAIIESVKFPEPDAALMIMDLCKALVHMHDKSIVHRDLKPENLLVQRNEDKSTTLKLADFGLAKHVVRPIFTVCGTPTYVAPEILSEKGYGLEVDMWAAGVILYILLCGFPPFRSPERDQDELFNIIQLGHFEFLPPYWDNISDTAAKDLVSRLLVVDPKKRYTAHQVLQHPWIETAGKTNTVKRQKQVSPSSEGHFRSQHKRVVEQVS

SEQ ID NO: 975 - DNA, 2720 bp, Homo sapiens
  CDS (149)..(1825)
ggacactgacatggactgaaggagtagaaaagaagccttgggctctcccagatggaagaatgaccgtgtgaggaaactgtttaacctcaagggcagggaaatcaggagcgtctctgatttcttcagggaaggggatgctttcatagctatgggcaaagaaccactgacactgaagagcattcaggtggctgtagaagaactgtaccccaacaaagcccgggccctgacactggcccagcacagccgtgccccttctccaaggctgaggagcaggctgtttagcaaggctctgaaaggagaccaccgctgtggggagaccgagacccccaagagctgcagcgaagttgcaggatgcaaggcagctatgaggcaccaggggaagatccccgaggagctttcactagatgacagagcgaggacccagaagaagtgggggagggggaaatgggagccagaacccagtagcaagccccccagggaagccactctggaagagaggcacgcaaggggagagaagcatcttggggtggagattgaaaagacctcgggtgaaattatcagatgcgagaagtgcaagagagagagggagcttcagcagagcctggagcgtgagaggctttctctggggaccagtgagctggatatggggaagggcccaatgtatgatgtggagaagctggtgaggaccagaagctgcaggaggtctcccgaggcaaatcctgcaagtggggaggaagggtggaagggtgacagccacaggagcagccccaggaatcccactcaagagctgaggagacccagcaagagcatggacaagaaagaggacagaggcccagaggatcaagaaagccatgctcagggagcagccaaggccaagaaggaccttgtggaagttcttcctgtcacagaggaggggctgagggaggtgaagaaggacaccaggcccatgagcaggagcaaacatggtggctggctcctgagagagcaccaggcgggctttgagaagctccgcaggacccgaggagaagagaaggaggcagagaaggagaaaaagccatgtatgtctggaggcagaaggatgactctcagagatgaccaacctgcaaagctagaaaaggagcccaagacgaggccagaagagaacaagccagagcggcccagcggtcggaagccacggcccatgggcatcattgccgccaatgtggaaaagcattatgagactggccgggtcattggggatgggaactttgctgtcgtgaaggagtgcagacaccgcgagaccaggcaggcctatgcgatgaagatcattgacaagtccagactcaagggcaaggaggacatggtggacagtgagatcttgcatgaagtctacgaaacagacatggaaatctacctgatcctggagtacgtgcagggaggagacctttttgacgccatcatagaaagtgtgaagttcccggagcccgatgctgccctcatgatcatggacttatgcaaagccctcgtccacatgcacgacaagagcattgtccaccgggacctcaagccggaaaaccttttggttcagcgaaatgaggacaaatctactaccttgaaattggctgattttggacttgcaaagcatgtggtgagacctatatttactgtgtgtgggaccccaacttacgtagctcccgaaattctttctgagaaaggtaagtgttacacatcgatctgtgggactctagttcccttactaacaaatgtttcatttgtcatatttactagttttcaatatggaataaatctcagagaactgacacttaggcttggatttggacttcaatgaaaatatttgaagtaggcttgaccaaagcatgagagctttctcctcattagggctgcccttgttacagtcaatggatcagtgtgtgtgcatgtgtgtgtgtgtgtgtgtgtttattgtgtttaggcaggacagtgagatgaaagatgatggagaattgggtggggaactcaagcaagcaaggctacttgacccaaggctatctctaataggagagaattgaagcagtccttatggtacttggtttaaaaatttcttcaccaaccttgcatttaaaggaaaaggatcccattttcctccatgaactctatgaatatttattacctacttgtatattatgcaaggatccaatgagctgttttagtgacaaactttctaaaacatttaaaaaggaaataatagttatgatatggctctaaatatatgaatgactatttgactactgtggcactccaggagaaaccaatttacccaccattggtaagatgggaagactctcattgggttgcagggttggtgacagggagaagggatggacggatagtttcccagcagcagaagcatcaggataattaagatgaggagatggccagggatggtggctcatgcctgtaatcccagctctttgggaggctgaggcaggtggatcacctgaggtcaggcgtttgaaaccatcctggccaacatggtgaaaccctgtctgtactaaaactacaaaaaaattagctgggcgtggtggcacatgcctgtaatctgagctactcgggaggctgaggcaggagaattgcttgaaccggggaggtggagtttgcagtgagccaagatcgtgccattgcactccagcctgggcaacaagagtgaaacttcatctcaaaaaaaaaaaaaaaaaaaaaac

SEQ ID NO: 976 - protein, 559 aa, Homo sapiens
MGKEPLTLKSIQVAVEELYPNKARALTLAQHSRAPSPRLRSRLFSKALKGDHRCGETETPKSCSEVAGCKAAMRHQGKIPEELSLDDRARTQKKWGRGKWEPEPSSKPPREATLEERHARGEKHLGVEIEKTSGEIIRCEKCKRERELQQSLERERLSLGTSELDMGKGPMYDVEKLVRTRSCRRSPEANPASGEEGWKGDSHRSSPRNPTQELRRPSKSMDKKEDRGPEDQESHAQGAAKAKKDLVEVLPVTEEGLREVKKDTRPMSRSKHGGWLLREHQAGFEKLRRTRGEEKEAEKEKKPCMSGGRRMTLRDDQPAKLEKEPKTRPEENKPERPSGRKPRPMGIIAANVEKHYETGRVIGDGNFAVVKECRHRETRQAYAMKIIDKSRLKGKEDMVDSEILHEVYETDMEIYLILEYVQGGDLFDAIIESVKFPEPDAALMIMDLCKALVHMHDKSIVHRDLKPENLLVQRNEDKSTTLKLADFGLAKHVVRPIFTVCGTPTYVAPEILSEKGKCYTSICGTLVPLLTNVSFVIFTSFQYGINLRELTLRLGFGLQ

SEQ ID NO: 977 - DNA, 947 bp, Homo sapiens
  CDS (7)..(936)
gacctgatgaagaatgacacgaggatacactttcaggaagactggaagataataaccctgtttataggcggcaatgacctctgtgatttctgcaatgatctggtccactattctccccagaacttcacagacaacattggaaaggccctggacatcctccatgctgaggttcctcgggcatttgtgaacctggtgacggtgcttgagatcgtcaacctgagggagctgtaccaggagaaaaaagtctactgcccaaggatgatcctcaggtctctgtgtccctgtgtcctgaagtttgatgataactcaacagaacttgctaccctcatcgaattcaacaagaagtttcaggagaagacccaccaactgattgagagtgggcgatatgacacaagggaagattttactgtggttgtgcggccgttctttgaaaacgtggacatgccaaagacctcggaaggattgcctgacaactctttcttcgctcctgactgtttccacttcagcagcaagtctcactcccgagcagccagtgctctctggaacaatatgctggagcctgttggccagaagacgactcgtcataagtttgaaaacaagatcaatatcacatgtccgaaccaggtccagccgtttctgaggacctacaagaacagcatgcagggtcatgggacctggctgccatgcagggacagagccccttctgccttgcaccctacctcagtgcatgccctgagacctgcagacatccaagttgtggctgctctgggggattctctgaccgctggcaatggaattggctccaaaccagacgacctccccgatgtcaccacacagtatcggggactgtcatacagagaaagtaaaccagggttcttatcagactcctgggtcagcaaatccaacaggaaatgcaccagaaaagcaccaaatccctgaatctacac

SEQ ID NO: 978 - protein, 310 aa, Homo sapiens
MKNDTRIHFQEDWKIITLFIGGNDLCDFCNDLVHYSPQNFTDNIGKALDILHAEVPRAFVNLVTVLEIVNLRELYQEKKVYCPRMILRSLCPCVLKFDDNSTELATLIEFNKKFQEKTHQLIESGRYDTREDFTVVVRPFFENVDMPKTSEGLPDNSFFAPDCFHFSSKSHSRAASALWNNMLEPVGQKTTRHKFENKINITCPNQVQPFLRTYKNSMQGHGTWLPCRDRAPSALHPTSVHALRPADIQVVAALGDSLTAGNGIGSKPDDLPDVTTQYRGLSYRESKPGFLSDSWVSKSNRKCTRKAPNP

SEQ ID NO: 979 - DNA, 3332 bp, Homo sapiens
atgacctgggacacagctctctggacctcagtttttctgattgggctccttcctacccttggtttcgctaattgcatcctccagacttctggtaaaatgtgtactttaagaggtagatacccccagcccccacaaccacctctctgcttgtctcccctagtccaccagctccgaccagcagacatcaaagtggtggccgccctgggtaatgatgaaaccttccaggaaagtggtgcagggcagctaagtgagcctgaccccaggcagtggtcctggccacaggcctgcttgcctggggtaaaaaaggaaatgcaagatgtggtaggtgagagaacgccgagccgtcgccgcagcctccgccgccgagaagcccttgttcccgctgctgggaaggagagtctgtgccgacaagatattttcatttccttgttggaaattatcaagcattttcctccctcccctcaggacatcaacctggagaaagactggaagctggtcacactcttcattggggtcaacgacttgtgtcattactgtccacttgttcagggccccgttatagacctgggtgggatggataccctccactccctgcagctcccaagggctttcgtcaacgtggtggaggtcatggagctggctagcctgtaccagggccaaggcgggaaatgtgccatgctggcagctcaggaagcctggaacagcctcctggcctccagcaggtacagtgagcaggagtccttcaccgtggttttccagcctttcttctatgagaccaccccatctgacccccgactccaggattctaccacgctggcctggcatctctggaataggatgatggagccagcaggagagaaagatgagccattgagtgtaaaacacgggaggccaatgaagtgtccctctcaggagagcccctatctgttcagctacagaaacagcaactacctgaccagactgcagaaaccccaagacaagcttgtaagagaaggagcggaaatcagatgtcctgacaaagacccctccgatacggttcccacctcagttcataggctgaagccggctgacatcaacgtaattggagccctgggtgactctctcacggcaggcaatggggccgggtccacacctgggaacgtcttggacgtcttgactcagtaccgaggcctgtcctggagcgtcggcggagatgagaacatcggcaccgttaccaccctggcagacatcctccgggaattcaacccttccctgaagggcttctctgttggcactgggaaagaaaccagtcctaatgccttcttaaaccaggctgtggcaggaggccgagctgagcaggccaggaggctggtggacctgatgaagaatgacacgaggatacactttcaggaagactggaagataataaccctgtttataggcggcaatgacctctgtgatttctgcaatgatctggtacactattctccccagaacttcacagacaacattggaaaggccctggacatcctccatgctgagtctcaggttcctcgggcatttgtgaacctggtgacggtgcttgagatcgtcaacctgagggagctgtaccaggagaaaaaagtctactgcccaaggatgatcctcaggtcactgtgtccctgtgtcctgaagtttgatgataactcaacagaacttgctaccctcatcgaattcaacaagaagtttcaggagaagacccaccaactgattgagagtgggcgatatgacacaagggaagattttactgtggttgtgcagccgttctttgaaaacgtggacatgccaaagacccaggaaggattgcctgacaactctttcttcgctcctgactgtttccacttcagcagcaagtctcactcccgagcagccagtgctctctggaacaatatgctggagcctgttggccagaagacgactcgtcataagtttgaaaacaagatcaatatcacatgtccgtcacaggtccagccgtttctgaggacctacaagaacagcatgcagggtcatgggacctggctgccatgcagggacagagccccttctgccttgcaccctacctcagtgcatgccctgagacctgcagacatccaagttgtggctgctctgggggattctctgaccgctggcaatggaattggctccaaaccagacgacctccccgatgtcaccacacagtatcggggactgtcatacagtgcaggaggggacggctccctggagaatgtgaccaccttacctagttctatccttcgggagtttaacagaaacctcacaggctacgccgtgggcacgggtgatgccaatgacacgaatgcattcctcaatcaagctgttcccggagcaaaggctagggatcttatgagccaagtccaaactctgatgcagaagatgaaagatgatcatagagtaaatttccatgaagactggaaggtcatcacagtgctgatcggaggcagcgatttatgtgactactgcacagattcgaatctgtattctgcagccaactttgttcaccatctccgcaatgccttggacgtcctgcatagagaggtgcccagagtcctggtcaacctcgtggacttcctgaaccccactatcatgcggcaggtgttcctgggaaacccagacaagtgcccagtgcagcaggccagcgttttgtgtaactgcgttctgaccctgcgggagaactcccaagagctagccaggctggaggccttcagccgagcctaccagagcagcatgcgcgagctggtggggtcaggccgctatgacacgcaggaggacttctctgtggtgctgcagcccttcttccagaacatccagctccctgtcctgcaggatgggctcccagatacgtccttctttgccccagactgcatccacccaaatcagaaattccactcccagctggccagagccctttggaccaatatgcttgaaccacttggaagcaaaacagagaccctggacctgagagcagagatgcccatcacctgtcccactcagaatgagcccttcctgagaacccctcggaatagtaactacacgtaccccatcaagccagccattgagaactggggcagtgacttcctgtgtacagagtggaaggcttccaatagtgttccaacctctgtccaccagctccgaccagcagacatcaaagtggtggccgccctgggtgactctctgactacagcagtgggagctcgaccaaacaactccagtgacctacccacatcttggaggggactctcttggagcattggaggggatgggaacttggagactcacaccacactgcccagtattct

SEQ ID NO: 980 - protein, 1419 aa, Homo sapiens
MTWDTALWTSVFLIGLLPTLGFANCILQTSGKMCTLRGRYPQPPQPPLCLSPLVHQLRPADIKVVAALGNDETFQESGAGQLSEPDPRQWSWPQACLPGVKKEMQDVVGERTPSRRRSLRRREALVPAAGKESLCRQDIFISLLEIIKHFPPSPQDINLEKDWKLVTLFIGVNDLCHYCPLVQGPVIDLGGMDTLHSLQLPRAFVNVVEVMELASLYQGQGGKCAMLAAQEAWNSLLASSRYSEQESFTVVFQPFFYETTPSDPRLQDSTTLAWHLWNRMMEPAGEKDEPLSVKHGRPMKCPSQESPYLFSYRNSNYLTRLQKPQDKLVREGAEIRCPDKDPSDTVPTSVHRLKPADINVIGALGDSLTAGNGAGSTPGNVLDVLTQYRGLSWSVGGDENIGTVTTLADILREFNPSLKGFSVGTGKETSPNAFLNQAVAGGRAEQARRLVDLMKNDTRIHFQEDWKIITLFIGGNDLCDFCNDLVHYSPQNFTDNIGKALDILHAESQVPRAFVNLVTVLEIVNLRELYQEKKVYCPRMILRSLCPCVLKFDDNSTELATLIEFNKKFQEKTHQLIESGRYDTREDFTVVVQPFFENVDMPKTQEGLPDNSFFAPDCFHFSSKSHSRAASALWNNMLEPVGQKTTRHKFENKINITCPSQVQPFLRTYKNSMQGHGTWLPCRDRAPSALHPTSVHALRPADIQVVAALGDSLTAGNGIGSKPDDLPDVTTQYRGLSYSAGGDGSLENVTTLPSSILREFNRNLTGYAVGTGDANDTNAFLNQAVPGAKARDLMSQVQTLMQKMKDDHRVNFHEDWKVITVLIGGSDLCDYCTDSNLYSAANFVHHLRNALDVLHREVPRVLVNLVDFLNPTIMRQVFLGNPDKCPVQQASVLCNCVLTLRENSQELARLEAFSRAYQSSMRELVGSGRYDTQEDFSVVLQPFFQNIQLPVLQDGLPDTSFFAPDCIHPNQKFHSQLARALWTNMLEPLGSKTETLDLRAEMPITCPTQNEPFLRTPRNSNYTYPIKPAIENWGSDFLCTEWKASNSVPTSVHQLRPADIKVVAALGDSLTTAVGARPNNSSDLPTSWRGLSWSIGGDGNLETHTTLPSILKKFNPYLLGFSTSTWEGTAGLNVAAEGARARRDMPAQAWDLVERMKNSPIHFQEDWKIITLFIGGNDLCDFCNDLVGEYVQHIQQALDILSEELPRAFVNVVEVMELASLYQGQGGKCAMLAAQNNCTCLRHSQSSLEKQELKKVNWNLQHGISSFSYWHQYTQREDFAVVVQPFFQNTLTPLNRGDTDLTFFSEDCFHFSDRGHAEMAIALWNNMLEPVGRKTTSNNFTHSRAKLKCPSPVSPYLYTLRNSRLLPDQAEEAPEVLYWAVPVAAGVGLVVGIIGTVVWRCRRGGRREDPPMSLRTVAL

SEQ ID NO: 981 - DNA, 1624 bp, Homo sapiens
  CDS (311)..(1240)
gccggctgacatcaatgtaattggagccctgggtgactctctcacggcaggcaatggggccgggtccacacctgggaacgtcttggacgtcttgactcagtaccgaggcctgtcctggagcgtcggcggagatgagaacatcggcaccgttaccaccctggcgaacatcctccgggaattcaacccttccctgaagggcttctctgttggcactgggaaagaaaccagtcctaatgccttcttaaaccaggctgtggcaggaggccgagctgaggatctacctgtccaggccaggaggctggtggacctgatgaagaatgacacgaggatacactttcaggaagactggaagataataaccctgtttataggcggcaatgacctctgtgatttctgcaatgatctggtccactattctccccagaacttcacagacaacattggaaaggccctggacatcctccatgctgaggttcctcgggcatttgtgaacctggtgacggtgcttgagatcgtcaacctgagggagctgtaccaggagaaaaaagtctactgcccaaggatgatcctcaggtctctgtgtccctgtgtcctgaagtttgatgataactcaacagaacttgctaccctcatcgaattcaacaagaagtttcaggagaagacccaccaactgattgagagtgggcgatatgacacaagggaagattttactgtggttgtgcagccgttctttgaaaacgtggacatgccaaagacctcggaaggattgcctgacaactctttcttcgctcctgactgtttccacttcagcagcaagtctcactcccgagcagccagtgctctctggaacaatatgctggagcctgttggccagaagacgactcgtcataagtttgaaaacaagatcaatatcacatgtccgaaccaggtccagccgtttctgaggacctacaagaacagcatgcagggtcatgggacctggctgccatgcagggacagagccccttctgccttgcaccctacctcagtgcatgccctgagacctgcagacatccaagttgtggctgctctgggggattctctgaccgctggcaatggaattggctccaaaccagacgacctccccgatgtcaccacacagtatcggggactgtcatacagagaaagtaaaccagggttcttatcagactcctgggtcagcaaatccaacaggaaatgcaccagaaaagcaccaaatccctgaatcttcacctccccgcttgcatgtatacgtgtacacgtggtgttcctacgtctctgtttactgtctttatgtgtttattcatgttgtcttgtagtcacacagctgcctttacatatatgtacacatctgcacagaaaacctctgaaacccatcgcacacttcgagaggccataaccaagacacaatcacaatcagccatgtcttgaaagattagcaattcgacaagaggaaagggtgagaaagggcatcccgaacacggaagtggagaagctcagggtgtgtcaggcgagcggttgcgtgtagatattctcaagtttctttctctcctaataaagttctcattcctgtaggcttcaaagtaagtggcgagtagctcagaat

SEQ ID NO: 982 - protein, 310 aa, Homo sapiens
MKNDTRIHFQEDWKIITLFIGGNDLCDFCNDLVHYSPQNFTDNIGKALDILHAEVPRAFVNLVTVLEIVNLRELYQEKKVYCPRMILRSLCPCVLKFDDNSTELATLIEFNKKFQEKTHQLIESGRYDTREDFTVVVQPFFENVDMPKTSEGLPDNSFFAPDCFHFSSKSHSRAASALWNNMLEPVGQKTTRHKFENKINITCPNQVQPFLRTYKNSMQGHGTWLPCRDRAPSALHPTSVHALRPADIQVVAALGDSLTAGNGIGSKPDDLPDVTTQYRGLSYRESKPGFLSDSWVSKSNRKCTRKAPNP

SEQ ID NO: 983 - DNA, 4425 bp, Homo sapiens
  CDS (16)..(4284)
ctggagcattctggcatggggctgcggccaggcattttcctcctggagctgctgctgcttctggggcaaggtacccctcagatccatacctctcctagaaagagtacattggaagggcagctatggccagagacagttcactctctgaagccttctgatattaaatttgtggcagccattggcaatctggaaattgtgccagacccagggacgggcgatctggagaagcaagacgaaaggccacagcaggtgtgcatgggagtgatgacagtcctttcagacatcatcagatatttcagtccttctgttccaatgcctgtgtgccacactggaaagagagtcataccccacgatggtgctgaggacttgtggattcaggctcaagaactggtgagaaacatgaaagagaaccaacttgactttcaatttgactggaagctcatcaatgtgttcttcagtaatgcaagccagtgttacctgtgcccctctgctcaacagaatgggcttgcggcgggcggcgtggatgagctgatgggggtgctggactacctgcagcaggaggtgcccagagcatttgtaaacctggtggacctctctgaggttgcagaggtctctcgtcagtatcacggcacttggctcagccctgcaccagagccctgtaattgctcagaggagaccacccggctggccaaggtggtgatgcagtggtcttatcaggaagcctggaacagcctcctggcctccagcaggtacagtgagcaggagtccttcaccgtggttttccagcctttcttctatgagaccaccccatctgacccccgactccaggattctaccacgctggcctggcatctctggaataggatgatggagccagcaggagagaaagatgagccattgagtgtaaaacacgggaggccaatgaagtgtccctctcaggagagcccctatctgttcagctacagaaacagcaactacctgaccagactgcagaaaccccaagacaagcttgaggtaagagaaggagcggaaatcagatgtcctgacaaagacccctccgatacggttcccacctcagttcataggctgaagccggctgacatcaacgtaattggagccctgggtgactctctcacggcaggcaatggggccgggtccacacctgggaacgtcttggacgtcttgactcagtaccgaggcctgtcctggagcgtcggcggagatgagaacatcggcaccgttaccaccctggcggacatcctccgggaattcaacccttccctgaagggcttctctgttggcactgggaaagaaaccagtcctaatgccttcttaaaccaggctgtggcaggaggccgagctgagcaggccaggaggctggtggacctgatgaagaatgacacgaggatacactttcaggaagactggaagataataaccctgtttataggcggcaatgacctctgtgatttctgcaatgatctggtacactattctccccagaacttcacagacaacattggaaaggccctggacatcctccatgctgaggttcctcgggcatttgtgaacctggtgacggtgcttgagatcgtcaacctgagggagctgtaccaggagaaaaaagtctactgcccaaggatgatcctcaggtcactgtgtccctgtgtcctgaagtttgatgataactcaacagaacttgctaccctcatcgaattcaacaagaagtttcaggagaagacccaccaactgattgagagtgggcgatatgacacaagggaagattttactgtggttgtgcagccgttctttgaaaacgtggacatgccaaagacccaggaaggattgcctgacaactctttcttcgctcctgactgtttccacttcagcagcaagtctcactcccgagcagccagtgctctctggaacaatatgctggagcctgttggccagaagacgactcgtcataagtttgaaaacaagatcaatatcacatgtccgaaccaggtagagtggccgtttctgaggacctacaagaacagcatgcagggtcatgggacctggctgccatgcagggacagagccccttctgccttgcaccctacctcagtgcatgccctgagacctgcagacatccaagttgtggctgctctgggggattctctgaccgctggcaatggaattggctccaaaccagacgacctccccgatgtcaccacacagtatcggggactgtcatacagtgcaggaggggacggctccctggagaatgtgaccaccttacctgatatccttcgggagtttaacagaaacctcacaggctacgccgtgggcacgggtgatgccaatgacacgaatgcattcctcaatcaagctgttcccggagcaaaggctagggatcttatgagccaagtccaaactctgatgcagaagatgaaagatgatcatagagtaaatttccatgaagactggaaggtcatcacagtgctgatcggaggcagcgatttatgtgactactgcacagattcgaatctgtattctgcagccaactttgttcaccatctccgcaatgccttggacgtcctgcatagagaggtgcccagagtcctggtcaacctcgtggacttcctgaaccccactatcatgcggcaggtgttcctgggaaacccagacaagtgcccagtgcagcaggccagcgttttgtgtaactgcgttctgaccctgcgggagaactcccaagagctagccaggctggaggccttcagccgagcctaccagagcagcatgcgcgagctggtggggtcaggccgctatgacacgcaggaggacttctctgtggtgctgcagcccttcttccagaacatccagctccctgtcctgcaggatgggctcccagatacgtccttctttgccccagactgcatccacccaaatcagaaattccactcccagctggccagagccctttggaccaatatgcttgaaccacttggaagcaaaacagagaccctggacctgagagcagagatgcccatcacctgtcccactcagaatgagcccttcctgagaacccctcggaatagtaactacacgtaccccatcaagccagccattgagaactggggcagtgacttcctgtgtacagagtggaaggcttccaatagtgttccaacctctgtccaccagctccgaccagcagacatcaaagtggtggccgccctgggtgactctctgactgtggcagtgggagctcgaccaaacaactccagtgacctacccacatcttggaggggactctcttggagcattggaggggatgggaacttggagactcacaccacactgcccgacattctgaagaagttcaacccttacctccttggcttctctaccagcacctgggaggggacagcaggactaaatgtggcagcggaaggggccagagctagggacatgccagcccaggcctgggacctggtagagcgaatgaaaaacagcccccaggacatcaacctggagaaagactggaagctggtcacactcttcattggggtcaacgacttgtgtcattactgtgagaatccggtaggcgaatatgttcagcacatccaacaggccctggacatcctctctgaggagctcccaagggctttcgtcaacgtggtggaggtcatggagctggctagcctgtaccagggccaaggcgggaaatgtgccatgctggcagctcagaacaactgcacttgcctcagacactcgcaaagctccctggagaagcaagaactgaagaaagtgaactggaacctccagcatggcatctccagtttctcctactggcaccaatacacacagcgtgaggactttgcggttgtggtgcagcctttcttccaaaacacactcaccccactgaacagaggggacactgacctcaccttcttctccgaggactgttttcacttctcagaccgcgggcatgccgagatggccatcgcactctggaacaacatgctggaaccagtgggccgcaagactacctccaacaacttcacccacagccgagccaaactcaagtgcccctctcctgagagcccttacctctacaccctgcggaacagccgattgctcccagaccaggctgaagaagcccccgaggtgctctactgggctgtcccagtggcagcgggagtcggccttgtggtgggcatcatcgggacagtggtctggaggtgcaggagaggtggccggagggaagatcctccaatgagcctgcgcactgtggccctctaggcccgggggtgggtcctcaccctaaactccctatagccactctcttcaccgccctctgccccagccactcccggccaccaggacatgcttcaatgcctggtgccataggaagcccaggggacagtcacaacttcttgg

SEQ ID NO: 984 - protein, 1423 aa, Homo sapiens
MGLRPGIFLLELLLLLGQGTPQIHTSPRKSTLEGQLWPETVHSLKPSDIKFVAAIGNLEIVPDPGTGDLEKQDERPQQVCMGVMTVLSDIIRYFSPSVPMPVCHTGKRVIPHDGAEDLWIQAQELVRNMKENQLDFQFDWKLINVFFSNASQCYLCPSAQQNGLAAGGVDELMGVLDYLQQEVPRAFVNLVDLSEVAEVSRQYHGTWLSPAPEPCNCSEETTRLAKVVMQWSYQEAWNSLLASSRYSEQESFTVVFQPFFYETTPSDPRLQDSTTLAWHLWNRMMEPAGEKDEPLSVKHGRPMKCPSQESPYLFSYRNSNYLTRLQKPQDKLEVREGAEIRCPDKDPSDTVPTSVHRLKPADINVIGALGDSLTAGNGAGSTPGNVLDVLTQYRGLSWSVGGDENIGTVTTLADILREFNPSLKGFSVGTGKETSPNAFLNQAVAGGRAEQARRLVDLMKNDTRIHFQEDWKIITLFIGGNDLCDFCNDLVHYSPQNFTDNIGKALDILHAEVPRAFVNLVTVLEIVNLRELYQEKKVYCPRMILRSLCPCVLKFDDNSTELATLIEFNKKFQEKTHQLIESGRYDTREDFTVVVQPFFENVDMPKTQEGLPDNSFFAPDCFHFSSKSHSRAASALWNNMLEPVGQKTTRHKFENKINITCPNQVEWPFLRTYKNSMQGHGTWLPCRDRAPSALHPTSVHALRPADIQVVAALGDSLTAGNGIGSKPDDLPDVTTQYRGLSYSAGGDGSLENVTTLPDILREFNRNLTGYAVGTGDANDTNAFLNQAVPGAKARDLMSQVQTLMQKMKDDHRVNFHEDWKVITVLIGGSDLCDYCTDSNLYSAANFVHHLRNALDVLHREVPRVLVNLVDFLNPTIMRQVFLGNPDKCPVQQASVLCNCVLTLRENSQELARLEAFSRAYQSSMRELVGSGRYDTQEDFSVVLQPFFQNIQLPVLQDGLPDTSFFAPDCIHPNQKFHSQLARALWTNMLEPLGSKTETLDLRAEMPITCPTQNEPFLRTPRNSNYTYPIKPAIENWGSDFLCTEWKASNSVPTSVHQLRPADIKVVAALGDSLTVAVGARPNNSSDLPTSWRGLSWSIGGDGNLETHTTLPDILKKFNPYLLGFSTSTWEGTAGLNVAAEGARARDMPAQAWDLVERMKNSPQDINLEKDWKLVTLFIGVNDLCHYCENPVGEYVQHIQQALDILSEELPRAFVNVVEVMELASLYQGQGGKCAMLAAQNNCTCLRHSQSSLEKQELKKVNWNLQHGISSFSYWHQYTQREDFAVVVQPFFQNTLTPLNRGDTDLTFFSEDCFHFSDRGHAEMAIALWNNMLEPVGRKTTSNNFTHSRAKLKCPSPESPYLYTLRNSRLLPDQAEEAPEVLYWAVPVAAGVGLVVGIIGTVVWRCRRGGRREDPPMSLRTVAL

SEQ ID NO: 985 - DNA, 3517 bp, Homo sapiens
  CDS (5)..(3505)
aaagatggcggcagcggcggcggtgggcaacgcggtgccctgcggggcccggccttgcggggtccggcctgacgggcagcccaagcccgggccgcagccgcgcgcgctccttgccgccgggccggcgctcatagcgaacggtgacgagctggtggctgccgtgtggccgtaccggcggttggcgctgttgcggcgcctcacggtgctgccattcgccgggctgctttacccggcctggttgggtgccgcagccgctggctgctggggctggggcagcagttgggtgcagatccccgaagctgcgctgctcgtgcttgccaccatctgcctcgcgcacgcgctcactgtcctctcggggcattggtctgtgcacgcgcattgcgcgctcacctgcaccccggagtacgaccccagcaaagcgacctttgtgaaggtggtgccaacccccaacaatggctccacggagctcgtggccctgcaccgcaatgagggcgaagacgggcttgaggtgctgtccttcgaattccagaagatcaagtattcctacgatgccctggagaagaagcagtttctccccgtggcctttcctgtgggaaacgccttctcatactatcagagcaacagaggcttccaggaagactcagagatccgagcagctgagaagaaatttgggagcaacaaggccgagatggtggtgcctgacttctcggagcttttcaaggagagagccacagcccccttctttgtatttcaggtgttctgtgtggggctctggtgcctggatgagtactggtactacagcgtctttacgctatccatgctggtggcgttcgaggcctcgctggtgcagcagcagatgcggaacatgtcggagatccggaagatgggcaacaagccccacatgatccaggtctaccgaagccgcaagtggaggcccattgccagtgatgagatcgtaccaggggacatcgtctccatcggccgctccccacaggagaacctggtgccatgtgacgtgcttctgctgcgaggccgctgcatcgtagacgaggccatgctcacgggggagtccgtgccacagatgaaggagcccatcgaagacctcagcccagaccgggtgctggacctccaggctgattcccggctgcacgtcatcttcgggggcaccaaggtggtgcagcacatccccccacagaaagccaccacgggcctgaagccggttgacagcgggtgcgtggcctacgtcctgcggaccggattcaacacatcccagggcaagctgctgcgcaccatcctcttcggggtcaagagggtgactgcgaacaacctggagaccttcatcttcatcctcttcctcctggtgtttgccatcgctgcagctgcctatgtatggattgaaggtaccaaggaccccagccggaaccgctacaagctgtttctggagtgcaccctgatcctcacctcggtcgtgcctcctgagctgcccatcgagctgtccctggccgtcaacacctccctcatcgccctggccaagctctacatgtactgcacagagcccttccggatcccctttgctggcaaggtcgaggtgtgctgctttgacaagacggggacgttgaccagtgacagcctggtggtgcgcggtgtggccgggctgagagacgggaaggaggtgaccccagtgtccagcatccctgtagaaacacaccgggccctggcctcgtgccactcgctcatgcagctggacgacggcaccctcgtgggtgaccctctagagaaggccatgctgacggccgtggactggacgctgaccaaagatgagaaagtattcccccgaagtattaaaactcaggggctgaaaattcaccagcgctttcattttgccagtgccctgaagcgaatgtccgtgcttgcctcgtatgagaagctgggctccaccgacctttgttacatcgcggccgtgaagggggcccccgaaactctgcactccatggcccgggaggtcaagcgggaggccctggagtgcagcctcaagttcgtcggcttcattgtggtctcctgcccgctcaaggctgactcgaaggccgtgatccgggagatccagaatgcgtcccaccgggtgttcatgatcacgggagacaacccgctcactgcatgccacgtggcccaggagctgcacttcattgaaaaggcccacacgctgatcctgcagcctccctccgagaaaggccggcagtgcgagtggcgctccattgacggcagcatcgtgctgcccctggcccggggctccccaaaggcactggccctggagtacgcactgtgcctcacaggcgacggcttggcccacctgcaggccaccgacccccagcagctgctccgcctcatcccccatgtgcaggtgttcgcccgtgtggctcccaagcagaaggagtttgtcatcaccagcctgaaggagctgggctacgtgaccctcatgtgtggggatggcaccaacgacgtgggcgccctgaagcatgctgacgtgggtgtggcgctcttggccaatgcccctgagcgggttgtcgagcggcgacggcggccccgggacagcccaaccctgagcaacagtggcatcagagccacctccaggacagccaagcagcggtcggggctccctccctccgaggagcagccaacctcccagagggaccgcctgagccaggtgctgcgagacctcgaggacgagagtacgcccattgtgaaactgggggatgccagcatcgcagcacccttcacctccaagctctcatccatccagtgcatctgccacgtgatcaagcagggccgctgcacgctggtgaccacgctacagatgttcaagatcctggcgctcaatgccctcatcctggcctacagccagagcgtcctctacctggagggagtcaagttcagtgacttccaggccaccctacaggggctgctgctggccggctgcttcctcttcatctcccgttccaagcccctcaagaccctctcccgagaacggcccctgcccaacatcttcaacctgtacaccatcctcaccgtcatgctccagttctttgtgcacttcctgagccttgtctacctgtaccgtgaggcccaggcccggagccccgagaagcaggagcagttcgtggacttgtacaaggagtttgagccaagcctggtcaacagcaccgtctacatcatggccatggccatgcagatggccaccttcgccatcaattacaaaggcccgcccttcatggagagcctgcccgagaacaagcccctggtgtggagtctggcagtttcactcctggccatcattggcctgctcctcggctcctcgcccgacttcaacagccagtttggcctcgtggacatccctgtggagttcaagctggtcattgcccaggtcctgctcctggacttctgcctggcgctcctggccgaccgcgtcctgcagttcttcctggggaccccgaagctgaaagtgccttcctgagatggcagt

SEQ ID NO: 986 - protein, 1167 aa, Homo sapiens
MAAAAAVGNAVPCGARPCGVRPDGQPKPGPQPRALLAAGPALIANGDELVAAVWPYRRLALLRRLTVLPFAGLLYPAWLGAAAAGCWGWGSSWVQIPEAALLVLATICLAHALTVLSGHWSVHAHCALTCTPEYDPSKATFVKVVPTPNNGSTELVALHRNEGEDGLEVLSFEFQKIKYSYDALEKKQFLPVAFPVGNAFSYYQSNRGFQEDSEIRAAEKKFGSNKAEMVVPDFSELFKERATAPFFVFQVFCVGLWCLDEYWYYSVFTLSMLVAFEASLVQQQMRNMSEIRKMGNKPHMIQVYRSRKWRPIASDEIVPGDIVSIGRSPQENLVPCDVLLLRGRCIVDEAMLTGESVPQMKEPIEDLSPDRVLDLQADSRLHVIFGGTKVVQHIPPQKATTGLKPVDSGCVAYVLRTGFNTSQGKLLRTILFGVKRVTANNLETFIFILFLLVFAIAAAAYVWIEGTKDPSRNRYKLFLECTLILTSVVPPELPIELSLAVNTSLIALAKLYMYCTEPFRIPFAGKVEVCCFDKTGTLTSDSLVVRGVAGLRDGKEVTPVSSIPVETHRALASCHSLMQLDDGTLVGDPLEKAMLTAVDWTLTKDEKVFPRSIKTQGLKIHQRFHFASALKRMSVLASYEKLGSTDLCYIAAVKGAPETLHSMAREVKREALECSLKFVGFIVVSCPLKADSKAVIREIQNASHRVFMITGDNPLTACHVAQELHFIEKAHTLILQPPSEKGRQCEWRSIDGSIVLPLARGSPKALALEYALCLTGDGLAHLQATDPQQLLRLIPHVQVFARVAPKQKEFVITSLKELGYVTLMCGDGTNDVGALKHADVGVALLANAPERVVERRRRPRDSPTLSNSGIRATSRTAKQRSGLPPSEEQPTSQRDRLSQVLRDLEDESTPIVKLGDASIAAPFTSKLSSIQCICHVIKQGRCTLVTTLQMFKILALNALILAYSQSVLYLEGVKFSDFQATLQGLLLAGCFLFISRSKPLKTLSRERPLPNIFNLYTILTVMLQFFVHFLSLVYLYREAQARSPEKQEQFVDLYKEFEPSLVNSTVYIMAMAMQMATFAINYKGPPFMESLPENKPLVWSLAVSLLAIIGLLLGSSPDFNSQFGLVDIPVEFKLVIAQVLLLDFCLALLADRVLQFFLGTPKLKVPS

SEQ ID NO: 987 - DNA, 3904 bp, Homo sapiens
  CDS (68)..(3679)
ttaccggaagtaaaacttcggaagtgaggcgttcctctgcccggaagtgagcgcggcgctaggaaagatggcggcagcggcggcggtgggcaacgcggtgccctgcggggcccggccttgcggggtccggcctgacgggcagcccaagcccgggcgcagccggcgcgcgctccttgccgccgggccggcgctcatagcgaacggtgacgagctggtggctgccgtgtggccgtaccggcggttggcgctgttgcggcgcctcacggtgctgccattcgccgggctgctttacccggcctggttgggtgccgcagccgctggctgctggggctggggcagcagttgggtgcagatccccgaagctgcgctgctcgtgcttgccaccatctgcctcgcgcacgcgctcactgtcctctcggggcattggtctgtgcacgcgcattgcgcgctcacctgcaccccggagtacgaccccagcaaagcgacctttgtgaaggtggtgccaacccccaacaatggctccacggagctcgtggccctgcaccgcaatgagggcgaagacgggcttgaggtgctgtccttcgaattccagaagatcaagtattcctacgatgccctggagaagaagcagtttctccccgtggcctttcctgtgggaaacgccttctcatactatcagagcaacagaggcttccaggaagactcagagatccgagcagctgagaagaaatttgggagcaacaaggccgagatggtggtgcctgacttctcggagcttttcaaggagagagccacagcccccttctttgtatttcaggtgttctgtgtggggctctggtgcctggatgagtactggtactacagcgtctttacgctatccatgctggtggcgttcgaggcctcgctggtgcagcagcagatgcggaacatgtcggagatccggaagatgggcaacaagccccacatgatccaggtctaccgaagccgcaagtggaggcccattgccagtgatgagatcgtaccaggggacatcgtctccatcggccgctccccacaggagaacctggtgccatgtgacgtgcttctgctgcgaggccgctgcatcgtagacgaggccatgctcacgggggagtccgtgccacagatgaaggagcccatcgaagacctcagcccagaccgggtgctggacctccaggctgattcccggctgcacgtcatcttcgggggcaccaaggtggtgcagcacatccccccacagaaagccaccacgggcctgaagccggttgacagcgggtgcgtggcctacgtcctgcggaccggattcaacacatcccagggcaagctgctgcgcaccatcctcttcggggtcaagagggtgactgcgaacaacctggagaccttcatcttcatcctcttcctcctggtgtttgccatcgctgcagctgcctatgtatggattgaaggtaccaaggaccccagccggaaccgctacaagctgtttctggagtgcaccctgatcctcacctcggtcgtgcctcctgagctgcccatcgagctgtccctggccgtcaacacctccctcatcgccctggccaagctctacatgtactgcacagagcccttccggatcccctttgctggcaaggtcgaggtgtgctgctttgacaagacggggacgttgaccagtgacagcctggtggtgcgcggtgtggccgggctgagagacgggaaggaggtgaccccagtgtccagcatccctgtagaaacacaccgggccctggcctcgtgccactcgctcatgcagctggacgacggcaccctcgtgggtgaccctctagagaaggccatgctgacggccgtggactggacgctgaccaaagatgagaaagtattcccccgaagtattaaaactcaggggctgaaaattcaccagcgctttcattttgccagtgccctgaagcgaatgtccgtgcttgcctcgtatgagaagctgggctccaccgacctctgctacatcgcggccgtgaagggggcccccgaaactctgcactccatgttctcccagtgcccgcccgactaccaccacatccacaccgagatctcccgggaaggagcccgcgtcctggcgctggggtacaaggagctgggacacctcactcaccagcaggcccgggaggtcaagcgggaggccctggagtgcagcctcaagttcgtcggcttcattgtggtctcctgcccgctcaaggctgactccaaggccgtgatccgggagatccagaatgcgtcccaccgggtggtcatgatcacgggagacaacccgctcactgcatgccacgtggcccaggagctgcacttcattgaaaaggcccacacgctgatcctgcagcctccctccgagaaaggccggcagtgcgagtggcgctccattgacggcagcatcgtgctgcccctggcccggggctccccaaaggcactggccctggagtacgcactgtgcctcacaggcgacggcttggcccacctgcaggccaccgacccccagcagctgctccgcctcatcccccatgtgcaggtgttcgcccgtgtggctcccaagcagaaggagtttgtcatcaccagcctgaaggagctgggctacgtgaccctcatgtgtggggatggcaccaacgacgtgggcgccctgaagcatgctgacgtgggtgtggcgctcttggccaatgcccctgagcgggttgtcgagcggcgacggcggccccgggacagcccaaccctgagcaacagtggcatcagagccacctccaggacagccaagcagcggtcggggctccctccctccgaggagcagccaacctcccagagggaccgcctgagccaggtgctgcgagacctcgaggacgagagtacgcccattgtgaaactgggggatgccagcatcgcagcacccttcacctccaagctctcatccatccagtgcatctgccacgtgatcaagcagggccgctgcacgctggtgaccacgctacagatgttcaagatcctggcgctcaatgccctcatcctggcctacagccagagcgtcctctacctggagggagtcaagttcagtgacttccaggccaccctacaggggctgctgctggccggctgcttcctcttcatctcccgttccaagcccctcaagaccctctcccgagaacggcccctgcccaacatcttcaacctgtacaccatcctcaccgtcatgctccagttctttgtgcacttcctgagccttgtctacctgtaccgtgaggcccaggcccggagccccgagaagcaggagcagttcgtggacttgtacaaggagtttgagccaagcctggtcaacagcaccgtctacatcatggccatggccatgcagatggccaccttcgccatcaattacaaaggcccgcccttcatggagagcctgcccgagaacaagcccctggtgtggagtctggcagtttcactcctggccatcattggcctgctcctcggctcctcgcccgacttcaacagccagtttggcctcgtggacatccctgtggagttcaagctggtcattgcccaggtcctgctcctggacttctgcctggcgctcctggccgaccgcgtcctgcagttcttcctggggaccccgaagctgaaagtgccttcctgagatggcagtgctggtacccactgcccaccctggctgccgctgggcgggaaccccaacagggccccgggagggaaccctgcccccaaccccccacagcaaggctgtacagtctcgcccttggaagactgagctgggacccccacagccatccgctggcttggccagcagaaccagccccaagccagcacctttggtaaataaagcagcatctgagattttaaa

SEQ ID NO: 988 - protein, 1204 aa, Homo sapiens
MAAAAAVGNAVPCGARPCGVRPDGQPKPGRSRRALLAAGPALIANGDELVAAVWPYRRLALLRRLTVLPFAGLLYPAWLGAAAAGCWGWGSSWVQIPEAALLVLATICLAHALTVLSGHWSVHAHCALTCTPEYDPSKATFVKVVPTPNNGSTELVALHRNEGEDGLEVLSFEFQKIKYSYDALEKKQFLPVAFPVGNAFSYYQSNRGFQEDSEIRAAEKKFGSNKAEMVVPDFSELFKERATAPFFVFQVFCVGLWCLDEYWYYSVFTLSMLVAFEASLVQQQMRNMSEIRKMGNKPHMIQVYRSRKWRPIASDEIVPGDIVSIGRSPQENLVPCDVLLLRGRCIVDEAMLTGESVPQMKEPIEDLSPDRVLDLQADSRLHVIFGGTKVVQHIPPQKATTGLKPVDSGCVAYVLRTGFNTSQGKLLRTILFGVKRVTANNLETFIFILFLLVFAIAAAAYVWIEGTKDPSRNRYKLFLECTLILTSVVPPELPIELSLAVNTSLIALAKLYMYCTEPFRIPFAGKVEVCCFDKTGTLTSDSLVVRGVAGLRDGKEVTPVSSIPVETHRALASCHSLMQLDDGTLVGDPLEKAMLTAVDWTLTKDEKVFPRSIKTQGLKIHQRFHFASALKRMSVLASYEKLGSTDLCYIAAVKGAPETLHSMFSQCPPDYHHIHTEISREGARVLALGYKELGHLTHQQAREVKREALECSLKFVGFIVVSCPLKADSKAVIREIQNASHRVVMITGDNPLTACHVAQELHFIEKAHTLILQPPSEKGRQCEWRSIDGSIVLPLARGSPKALALEYALCLTGDGLAHLQATDPQQLLRLIPHVQVFARVAPKQKEFVITSLKELGYVTLMCGDGTNDVGALKHADVGVALLANAPERVVERRRRPRDSPTLSNSGIRATSRTAKQRSGLPPSEEQPTSQRDRLSQVLRDLEDESTPIVKLGDASIAAPFTSKLSSIQCICHVIKQGRCTLVTTLQMFKILALNALILAYSQSVLYLEGVKFSDFQATLQGLLLAGCFLFISRSKPLKTLSRERPLPNIFNLYTILTVMLQFFVHFLSLVYLYREAQARSPEKQEQFVDLYKEFEPSLVNSTVYIMAMAMQMATFAINYKGPPFMESLPENKPLVWSLAVSLLAIIGLLLGSSPDFNSQFGLVDIPVEFKLVIAQVLLLDFCLALLADRVLQFFLGTPKLKVPS

SEQ ID NO: 989 - DNA, 3517 bp, Homo sapiens
  CDS (5)..(3505)
aaagatggcggcagcggcggcggtgggcaacgcggtgccctgcggggcccggccttgcggggtccggcctgacgggcagcccaagcccgggccgcagccgcgcgcgctccttgccgccgggccggcgctcatagcgaacggtgacgagctggtggctgccgtgtggccgtaccggcggttggcgctgttgcggcgcctcacggtgctgccattcgccgggctgctttacccggcctggttgggtgccgcagccgctggctgctggggctggggcagcagttgggtgcagatccccgaagctgcgctgctcgtgcttgccaccatctgcctcgcgcacgcgctcactgtcctctcggggcattggtctgtgcacgcgcattgcgcgctcacctgcaccccggagtacgaccccagcaaagcgacctttgtgaaggtggtgccaacccccaacaatggctccacggagctcgtggccctgcaccgcaatgagggcgaagacgggcttgaggtgctgtccttcgaattccagaagatcaagtattcctacgatgccctggagaagaagcagtttctccccgtggcctttcctgtgggaaacgccttctcatactatcagagcaacagaggcttccaggaagactcagagatccgagcagctgagaagaaatttgggagcaacaaggccgagatggtggtgcctgacttctcggagcttttcaaggagagagccacagcccccttctttgtatttcaggcgttctgtgtggggctctggtgcctggatgagtactggtactacagcgtctttacgctatccatgctggtggcgttcgaggcctcgctggtgcagcagcagatgcggaacatgtcggagatccggaagatgggcaacaagccccacatgatccaggtctaccgaagccgcaagtggaggcccattgccagtgatgagatcgtaccaggggacatcgtctccatcggccgctccccacaggagaacctggtgccatgtgacgtgcttctgctgcgaggccgctgcatcgtagacgaggccatgctcacgggggagtccgtgccacagatgaaggagcccatcgaagacctcagcccagaccgggtgctggacctccaggctgattcccggctgcacgtcatcttcgggggcaccaaggtggtgcagcacatccccccacagaaagccaccacgggcctgaagccggttgacagcgggtgcgtggcctacgtcctgcggaccggattcaacacatcccagggcaagctgctgcgcaccatcctcttcggggtcaagagggtgactgcgaacaacctggagaccttcatcttcatcctcttcctcctggtgtttgccatcgctgcagctgcctatgtatggattgaaggtaccaaggaccccagccggaaccgctacaagctgtttctggagtgcaccctgatcctcacctcggtcgtgcctcctgagctgcccatcgagctgtccctggccgtcaacacctccctcatcgccctggccaagctctacatgtactgcacagagcccttccggatcccctttgctggcaaggtcgaggtgtgctgctttgacaagacggggacgttgaccagtgacagcctggtggtgcgcggtgtggccgggctgagagacgggaaggaggtgaccccagtgtccagcatccctgtagaaacacaccgggccctggcctcgtgccactcgctcatgcagctggacgacggcaccctcgtgggtgaccctctagagaaggccatgctgacggccgtggactggacgctgaccaaagatgagaaagtattcccccgaagtattaaaactcaggggctgaaaattcaccagcgctttcattttgccagtgccctgaagcgaatgtccgtgcttgcctcgtatgagaagctgggctccaccgacctttgttacatcgcggccgtgaagggggcccccgaaactctgcactccatggcccgggaggtcaagcgggaggccctggagtgcagcctcaagttcgtcggcttcattgtggtctcctgcccgctcaaggctgactcgaaggccgtgatccgggagatccagaatgcgtcccaccgggtgttcatgatcacgggagacaacccgctcactgcatgccacgtggcccaggagctgcacttcattgaaaaggcccacacgctgatcctgcagcctccctccgagaaaggccggcagtgcgagtggcgctccattgacggcagcatcgtgctgcccctggcccggggctccccaaaggcactggccctggagtacgcactgtgcctcacaggcgacggcttggcccacctgcaggccaccgacccccagcagctgctccgcctcatcccccatgtgcaggtgttcgcccgtgtggctcccaagcagaaggagtttgtcatcaccagcctgaaggagctgggctacgtgaccctcatgtgtggggatggcaccaacgacgtgggcgccctgaagcatgctgacgtgggtgtggcgctcttggccaatgcccctgagcgggttgtcgagcggcgacggcggccccgggacagcccaaccctgagcaacagtggcatcagagccacctccaggacagccaagcagcggtcggggctccctccctccgaggagcagccaacctcccagagggaccgcctgagccaggtgctgcgagacctcgaggacgagagtacgcccattgtgaaactgggggatgccagcatcgcagcacccttcacctccaagctctcatccatccagtgcatctgccacgtgatcaagcagggccgctgcacgctggtgaccacgctacagatgttcaagatcctggcgctcaatgccctcatcctggcctacagccagagcgtcctctacctggagggagtcaagttcagtgacttccaggccaccctacaggggctgctgctggccggctgcttcctcttcatctcccgttccaagcccctcaagaccctctcccgagaacggcccctgcccaacatcttcaacctgtacaccatcctcaccgtcatgctccagttctttgtgcacttcctgagccttgtctacctgtaccgtgaggcccaggcccggagccccgagaagcaggagcagttcgtggacttgtacaaggagtttgagccaagcctggtcaacagcaccgtctacatcatggccatggccatgcagatggccaccttcgccatcaattacaaaggcccgcccttcatggagagcctgcccgagaacaagcccctggtgtggagtctggcagtttcactcctggccatcattggcctgctcctcggctcctcgcccgacttcaacagccagtttggcctcgtggacatccctgtggagttcaagctggtcattgcccaggtcctgctcctggacttctgcctggcgctcctggccgaccgcgtcctgcagttcttcctggggaccccgaagctgaaagtgccttcctgagatggcagt

SEQ ID NO: 990 - protein, 1167 aa, Homo sapiens
MAAAAAVGNAVPCGARPCGVRPDGQPKPGPQPRALLAAGPALIANGDELVAAVWPYRRLALLRRLTVLPFAGLLYPAWLGAAAAGCWGWGSSWVQIPEAALLVLATICLAHALTVLSGHWSVHAHCALTCTPEYDPSKATFVKVVPTPNNGSTELVALHRNEGEDGLEVLSFEFQKIKYSYDALEKKQFLPVAFPVGNAFSYYQSNRGFQEDSEIRAAEKKFGSNKAEMVVPDFSELFKERATAPFFVFQAFCVGLWCLDEYWYYSVFTLSMLVAFEASLVQQQMRNMSEIRKMGNKPHMIQVYRSRKWRPIASDEIVPGDIVSIGRSPQENLVPCDVLLLRGRCIVDEAMLTGESVPQMKEPIEDLSPDRVLDLQADSRLHVIFGGTKVVQHIPPQKATTGLKPVDSGCVAYVLRTGFNTSQGKLLRTILFGVKRVTANNLETFIFILFLLVFAIAAAAYVWIEGTKDPSRNRYKLFLECTLILTSVVPPELPIELSLAVNTSLIALAKLYMYCTEPFRIPFAGKVEVCCFDKTGTLTSDSLVVRGVAGLRDGKEVTPVSSIPVETHRALASCHSLMQLDDGTLVGDPLEKAMLTAVDWTLTKDEKVFPRSIKTQGLKIHQRFHFASALKRMSVLASYEKLGSTDLCYIAAVKGAPETLHSMAREVKREALECSLKFVGFIVVSCPLKADSKAVIREIQNASHRVFMITGDNPLTACHVAQELHFIEKAHTLILQPPSEKGRQCEWRSIDGSIVLPLARGSPKALALEYALCLTGDGLAHLQATDPQQLLRLIPHVQVFARVAPKQKEFVITSLKELGYVTLMCGDGTNDVGALKHADVGVALLANAPERVVERRRRPRDSPTLSNSGIRATSRTAKQRSGLPPSEEQPTSQRDRLSQVLRDLEDESTPIVKLGDASIAAPFTSKLSSIQCICHVIKQGRCTLVTTLQMFKILALNALILAYSQSVLYLEGVKFSDFQATLQGLLLAGCFLFISRSKPLKTLSRERPLPNIFNLYTILTVMLQFFVHFLSLVYLYREAQARSPEKQEQFVDLYKEFEPSLVNSTVYIMAMAMQMATFAINYKGPPFMESLPENKPLVWSLAVSLLAIIGLLLGSSPDFNSQFGLVDIPVEFKLVIAQVLLLDFCLALLADRVLQFFLGTPKLKVPS

SEQ ID NO: 991 - DNA, 3517 bp, Homo sapiens
  CDS (5)..(3505)
aaagatggcggcagcggcggcggtgggcaacgcggtgccctgcggggcccggccttgcggggtccggcctgacgggcagcccaagcccgggccgcagccgcgcgcgctccttgccgccgggccggcgctcatagcgaacggtgacgagctggtggctgccgtgtggccgtaccggcggttggcgctgttgcggcgcctcacggtgctgccattcgccgggctgctttacccggcctggttgggtgccgcagccgctggctgctggggctggggcagcagttgggtgcagatccccgaagctgcgctgctcgtgcttgccaccatctgcctcgcgcacgcgctcactgtcctctcggggcattggtctgtgcacgcgcattgcgcgctcacctgcaccccggagtacgaccccagcaaagcgacctttgtgaaggtggtgccaacccccaacaatggctccacggagctcgtggccctgcaccgcaatgagggcgaagacgggcttgaggtgctgtccttcgaattccagaagatcaagtattcctacgatgccctggagaagaagcagtttctccccgtggcctttcctgtgggaaacgccttctcatactatcagagcaacagaggcttccaggaagactcagagatccgagcagctgagaagaaatttgggagcaacaaggccgagatggtggtgcctgacttctcggagcttttcaaggagagagccacagcccccttctttgtatttcaggtgttctgtgtggggctctggtgcctggatgagtactggtactacagcgtctttacgctatccatgctggtggcgttcgaggcctcgctggtgcagcagcagatgcggaacatgtcggagatccggaagatgggcaacaagccccacatgatccaggtctaccgaagccgcaagtggaggcccattgccagtgatgagatcgtaccaggggacatcgtctccatcggccgctccccacaggagaacctggtgccatgtgacgtgcttctgctgcgaggccgctgcatcgtagacgaggccatgctcacgggggagtccgtgccacagatgaaggagcccatcgaagacctcagcccagaccgggtgctggacctccaggctgattcccggctgcacgtcatcttcgggggcaccaaggtggtgcagcacatccccccacagaaagccaccacgggcctgaagccggttgacagcgggtgcgtggcctacgtcctgcggaccggattcaacacatcccagggcaagctgctgcgcaccatcctcttcggggtcaagagggtgactgcgaacaacctggagaccttcatcttcatcctcttcctcctggtgtttgccatcgctgcagctgcctatgtatggattgaaggtaccaaggaccccagccggaaccgctacaagctgtttctggagtgcaccctgatcctcacctcggtcgtgcctcctgagctgcccatcgagctgtccctggccgtcaacacctccctcatcgccctggccaagctctacatgtactgcacagagcccttccggatcccctttgctggcaaggtcgaggtgtgctgctttgacaagacggggacgttgaccagtgacagcctggtggtgcgcggtgtggccgggctgagagacgggaaggaggtgaccccagtgtccagcatccctgtagaaacacaccgggccctggcctcgtgccactcgctcatgcagctggacgacggcaccctcgtgggtgaccctctagagaaggccatgctgacggccgtggactggacgctgaccaaagatgagaaagtattcccccgaagtattaaaactcaggggctgaaaattcaccagcgctttcattttgccagtgccctgaagcgaatgtccgtgcttgcctcgtatgagaagctgggctccaccgacctttgttacatcgcggccgtgaagggggcccccgaaactctgcactccatggcccgggaggtcaagcgggaggccctggagtgcagcctcaagttcgtcggcttcattgtggtctcctgcccgctcaaggctgactcgaaggccgtgatccgggagatccagaatgcgtcccaccgggtgttcatgatcacgggagacaacccgctcactgcatgccacgtggcccaggagctgcacttcattgaaaaggcccacacgctgatcctgcagcctccctccgagaaaggccggcagtgcgagtggcgctccattgacggcagcatcgtgctgcccctggcccggggctccccaaaggcactggccctggagtacgcactgtgcctcacaggcgacggcttggcccacctgcaggccaccgacccccagcagctgctccgcctcatcccccatgtgcaggtgttcgcccgtgtggctcccaagcagaaggagtttgtcatcaccagcctgaaggagctgggctacgtgaccctcatgtgtggggatggcaccaacgacgtgggcgccctgaagcatgctgacgtgggtgtggcgctcttggccaatgcccctgagcgggttgtcgagcggcgacggcggccccgggacagcccaaccctgagcaacagtggcatcagagccacctccaggacagccaagcagcggtcggggctccctccctccgaggagcagccaacctcccagagggaccgcctgagccaggtgctgcgagacctcgaggacgagagtacgaccattgtgaaactgggggatgccagcatcgcagcacccttcacctccaagctctcatccatccagtgcatctgccacgtgatcaagcagggccgctgcacgctggtgaccacgctacagatgttcaagatcctggcgctcaatgccctcatcctggcctacagccagagcgtcctctacctggagggagtcaagttcagtgacttccaggccaccctacaggggctgctgctggccggctgcttcctcttcatctcccgttccaagcccctcaagaccctctcccgagaacggcccctgcccaacatcttcaacctgtacaccatcctcaccgtcatgctccagttctttgtgcacttcctgagccttgtctacctgtaccgtgaggcccaggcccggagccccgagaagcaggagcagttcgtggacttgtacaaggagtttgagccaagcctggtcaacagcaccgtctacatcatggccatggccatgcagatggccaccttcgccatcaattacaaaggcccgcccttcatggagagcctgcccgagaacaagcccctggtgtggagtctggcagtttcactcctggccatcattggcctgctcctcggctcctcgcccgacttcaacagccagtttggcctcgtggacatccctgtggagttcaagctggtcattgcccaggtcctgctcctggacttctgcctggcgctcctggccgaccgcgtcctgcagttcttcctggggaccccgaagctgaaagtgccttcctgagatggcagt

SEQ ID NO: 992 - protein, 1167 aa, Homo sapiens
MAAAAAVGNAVPCGARPCGVRPDGQPKPGPQPRALLAAGPALIANGDELVAAVWPYRRLALLRRLTVLPFAGLLYPAWLGAAAAGCWGWGSSWVQIPEAALLVLATICLAHALTVLSGHWSVHAHCALTCTPEYDPSKATFVKVVPTPNNGSTELVALHRNEGEDGLEVLSFEFQKIKYSYDALEKKQFLPVAFPVGNAFSYYQSNRGFQEDSEIRAAEKKFGSNKAEMVVPDFSELFKERATAPFFVFQVFCVGLWCLDEYWYYSVFTLSMLVAFEASLVQQQMRNMSEIRKMGNKPHMIQVYRSRKWRPIASDEIVPGDIVSIGRSPQENLVPCDVLLLRGRCIVDEAMLTGESVPQMKEPIEDLSPDRVLDLQADSRLHVIFGGTKVVQHIPPQKATTGLKPVDSGCVAYVLRTGFNTSQGKLLRTILFGVKRVTANNLETFIFILFLLVFAIAAAAYVWIEGTKDPSRNRYKLFLECTLILTSVVPPELPIELSLAVNTSLIALAKLYMYCTEPFRIPFAGKVEVCCFDKTGTLTSDSLVVRGVAGLRDGKEVTPVSSIPVETHRALASCHSLMQLDDGTLVGDPLEKAMLTAVDWTLTKDEKVFPRSIKTQGLKIHQRFHFASALKRMSVLASYEKLGSTDLCYIAAVKGAPETLHSMAREVKREALECSLKFVGFIVVSCPLKADSKAVIREIQNASHRVFMITGDNPLTACHVAQELHFIEKAHTLILQPPSEKGRQCEWRSIDGSIVLPLARGSPKALALEYALCLTGDGLAHLQATDPQQLLRLIPHVQVFARVAPKQKEFVITSLKELGYVTLMCGDGTNDVGALKHADVGVALLANAPERVVERRRRPRDSPTLSNSGIRATSRTAKQRSGLPPSEEQPTSQRDRLSQVLRDLEDESTTIVKLGDASIAAPFTSKLSSIQCICHVIKQGRCTLVTTLQMFKILALNALILAYSQSVLYLEGVKFSDFQATLQGLLLAGCFLFISRSKPLKTLSRERPLPNIFNLYTILTVMLQFFVHFLSLVYLYREAQARSPEKQEQFVDLYKEFEPSLVNSTVYIMAMAMQMATFAINYKGPPFMESLPENKPLVWSLAVSLLAIIGLLLGSSPDFNSQFGLVDIPVEFKLVIAQVLLLDFCLALLADRVLQFFLGTPKLKVPS

SEQ ID NO: 993 - DNA, 3147 bp, Homo sapiens
  CDS (2)..(1705)
gatggcctcggcgctgagctatgtctccaagttcaagtccttcgtgatcttgttcgtcaccccgctcctgctgctgccactcgtcattctgatgcccgccaagtttgtcaggtgtgcctacgtcatcatcctcatggccatttactggtgcacagaagtcatccctctggctgtcacctctctcatgcctgtcttgcttttcccactcttccagattctggactccaggcaggtgtgtgtccagtacatgaaggacaccaacatgctgttcctgggcggcctcatcgtggccgtggctgtggagcgctggaacctgcacaagaggatcgccctgcgcacgctcctctgggtgggggccaagcctgcacggctgatgctgggcttcatgggcgtcacagccctcctgtccatgtggatcagtaacacggcaaccacggccatgatggtgcccatcgtggaggccatattgcagcagatggaagccacaagcgcagccaccgaggccggcctggagctggtggacaagggcaaggccaaggagctgccagggagtcaagtgatttttgaaggccccactctggggcagcaggaagaccaagagcggaagaggttgtgtaaggccatgaccctgtgcatctgctacgcggccagcatcgggggcaccgccaccctgaccgggacgggacccaacgtggtgctcctgggccagatgaacgagttgtttcctgacagcaaggacctcgtgaactttgcttcctggtttgcatttgcctttcccaacatgctggtgatgctgctgttcgcctggctgtggctccagtttgtttacatgagattcaattttaaaaagtcctggggctgcgggctagagagcaagaaaaacgagaaggctgccctcaaggtgctgcaggaggagtaccggaagttggggcccttgtccttcgcggagatcaacgtgctgatctgcttcttcctgctggtcatcctgtggttctcccgagaccccggcttcatgcccggctggctgactgttgcctgggtggagggtgagacaaagtatgtctccgatgccactgtggccatctttgtggccaccctgctattcattgtgccttcacagaagcccaagtttaacttccgcagccagactgaggaagaaaggaaaactccattttatccccctcccctgctggattggaaggtaacccaggagaaagtgccctggggcatcgtgctgctactagggggcggatttgctctggctaaaggatccgaggcctcggggctgtccgtgtggatggggaagcagatggagcccttgcacgcagtgcccccggcagccatcaccttgatcttgtccttgctcgttgccgtgttcactgagtgcacaagcaacgtggccaccaccaccttgttcctgcccatctttgcctccatgtctcgctccatcggcctcaatccgctgtacatcatgctgccctgtaccctgagtgcctcctttgccttcatgttgcctgtggccacccctccaaatgccatcgtgttcacctatgggcacctcaaggttgctgacatggtgaaaacaggagtcataatgaacataattggagtcttctgtgtgtttttggctgtcaacacctggggacgggccatatttgacttggatcatttccctgactgggctaatgtgacacatattgagacttaggaagagccacaagaccacacacacagcccttaccctcctcaggactaccgaaccttctggcacaccttgtacagagttttggggttcacaccccaaaatgacccaacgatgtccacacaccaccaaaacccagccaatgggccacctcttcctccaagcccagatgcagagatggtcatgggcagctggagggtaggctcagaaatgaagggaacccctcagtgggctgctggacccatctttcccaagccttgccattatctctgtgagggaggccaggtagccgagggatcaggatgcaggctgctgtacccgctctgcctcaagcatcccccacacagggctctggttttcactcgcttcgtcctagatagtttaaatgggaatcggatcccctggttgagagctaagacaaccacctaccagtgcccatgtcccttccagctcaccttgagcagcctcagatcatctctgtcactctggaagggacaccccagccagggacggaatgcctggtcttgagcaacctcccactgctggagtgcgagtgggaatcagagcctcctgaagcctctgggaactcctcctgtggccaccaccaaaggatgaggaatctgagttgccaacttcaggacgacacctggcttgccacccacagtgcaccacaggccaacctacgcccttcatcacttggttctgttttaatcgactggccccctgtcccacctctccagtgagcctccttcaactccttggtcccctgttgtctgggtcaacatttgccgagacgccttggctggcaccctctggggtcccccttttctcccaggcaggtcatcttttctgggagatgcttcccctgccatccccaaatagctaggatcacactccaagtatgggcagtgatggcgctctgggggccacagtgggctatctaggccctccctcacctgaggcccagagtggacacagctgttaatttccactggctatgccacttcagagtctttcatgccagcgtttgagctcctctgggtaaaatcttccctttgttgactggccttcacagccatggctggtgacaacagaggatcgttgagattgagcagcgcttggtgatctctcagcaaacaacccctgcccgtgggccaatctacttgaagttactcggacaaagaccccaaagtggggcaacaactccagagaggctgtgggaatcttcagaagcccccctgtaagagacagacatgagagacaagcatcttctttcccccgcaagtccattttatttccttcttgtgctgctctggaagagaggcagtagcaaagagatgagctcctggatggcattttccagggcaggagaaagtatgagagcctcaggaaaccccatcaaggaccgagtatgtgtctggttcctttggtggttggcttctggc

SEQ ID NO: 994 - protein, 568 aa, Homo sapiens [sequence omitted]

SEQ ID NO: 995 - DNA, 1729 bp, Homo sapiens
  CDS (2)..(1729)
caccagatctcccaccatggcctcggcgctgagctatgtctccaagttcaagtccttcgtgatcttgttcgtcaccccgctcctgctgctgccactcgtcattctgatgcccgccaagtttgtcaggtgtgcctacgtcatcatcctcatggccatttactggtgcacagaagtcatccctctggctgtcacctctctcatgcctgtcttgcttttcccactcttccagattctggactccaggcaggtgtgtgtccagtacatgaaggacaccaacatgctgttcctgggcggcctcatcgtggccgtggctgtggagcgctggaacctgcacaagaggatcgccctgcgcacgctcctctgggtgggggccaagcctgcacggctgatgctgggcttcatgggcgtcacagccctcctgtccatgtggatcagtaacacggcaaccacggccatgatggtgcccatcgtggaggccatattgcagcagatggaagccacaagcgcagccaccgaggccggcctggagctggtggacaagggcaaggccaaggagctgccagggagtcaagtgatttttgaaggccccactctggggcagcaggaagaccaagagcggaagaggttgtgtaaggccatgaccctgtgcatctgctacgcggccagcatcgggggcaccgccaccctgaccgggacgggacccaacgtggtgctcctgggccagatgaacgagttgtttcctgacagcaaggacctcgtgaactttgcttcctggtttgcatttgcctttcccaacatgctggtgatgctgctgttcgcctggctgtggctccagtttgtttacatgagattcaattttaaaaagtcctggggctgcgggctagagagcaagaaaaacgagaaggctgccctcaaggtgctgcaggaggagtaccggaagttggggcccttgtccttcgcggagatcaacgtgctgatctgcttcttcctgctggtcatcctgtggttctcccgagaccccggcttcatgcccggctggctgactgttgcctgggtggagggtgagacaaagtatgtctccgatgccactgtggccatctttgtggccaccctgctattcattgtgccttcacagaagcccaagtttaacttccgcagccagactgaggaagaaaggaaaactccattttatccccctcccctgctggattggaaggtaacccaggagaaagtgccctggggcatcgtgctgctactagggggcggatttgctctggctaaaggatccgaggcctcggggctgtccgtgtggatggggaagcagatggagcccttgcacgcagtgcccccggcagccatcaccttgatcttgtccttgctcgttgccgtgttcactgagtgcacaagcaacgtggccaccaccaccttgttcctgcccatctttgcctccatgtctcgctccatcggcctcaatccgctgtacatcatgctgccctgtaccctgagtgcctcctttgccttcatgttgcctgtggccacccctccaaatgccatcgtgttcacctatgggcacctcaaggttgctgacatggtgaaaacaggagtcataatgaacataattggagtcttctgtgtgtttttggctgtcaacacctggggacgggccatatttgacttggatcatttccctgactgggctaatgtgacacatattgagactctcgagggc

SEQ ID NO: 996 - protein, 576 aa, Homo sapiens
TRSPTMASALSYVSKFKSFVILFVTPLLLLPLVILMPAKFVRCAYVIILMAIYWCTEVIPLAVTSLMPVLLFPLFQILDSRQVCVQYMKDTNMLFLGGLIVAVAVERWNLHKRIALRTLLWVGAKPARLMLGFMGVTALLSMWISNTATTAMMVPIVEAILQQMEATSAATEAGLELVDKGKAKELPGSQVIFEGPTLGQQEDQERKRLCKAMTLCICYAASIGGTATLTGTGPNVVLLGQMNELFPDSKDLVNFASWFAFAFPNMLVMLLFAWLWLQFVYMRFNFKKSWGCGLESKKNEKAALKVLQEEYRKLGPLSFAEINVLICFFLLVILWFSRDPGFMPGWLTVAWVEGETKYVSDATVAIFVATLLFIVPSQKPKFNFRSQTEEERKTPFYPPPLLDWKVTQEKVPWGIVLLLGGGFALAKGSEASGLSVWMGKQMEPLHAVPPAAITLILSLLVAVFTECTSNVATTTLFLPIFASMSRSIGLNPLYIMLPCTLSASFAFMLPVATPPNAIVFTYGHLKVADMVKTGVIMNIIGVFCVFLAVNTWGRAIFDLDHFPDWANVTHIETLEG

SEQ ID NO: 997 - DNA, 1790 bp, Homo sapiens
  CDS (16)..(1719)
tctccctcccgcgcgatggcctcggcgctgagctatgtctccaagttcaagtccttcgtgatcttgttcgtcaccccgctcctgctgctgccactcgtcattctgatgcccgccaaggtcagttgtgcctacgtcatcatcctcatggccatttactggtgcacagaagtcatccctctggctgtcacctctctcatgcctgtcttgcttttcccactcttccagattctggactccaggcaggtgtgtgtccagtacatgaaggacaccaacatgctgttcctgggcggcctcatcgtggccgtggctgtggagcgctggaacctgcacaagaggatcgccctgcgcacgctcctctgggtgggggccaagcctgcacggctgatgctgggcttcatgggcgtcacagccctcctgtccatgtggatcagtaacacggcaaccacggccatgatggtgcccatcgtggaggccatattgcagcagatggaagccacaagcgcagccaccgaggccggcctggagctggtggacaagggcaaggccaaggagctgccagggagtcaagtgatttttgaaggccccactctggggcagcaggaagaccaagagcggaagaggttgtgtaaggccatgaccctgtgcatctgctacgcggccagcatcgggggcaccgccaccctgaccgggacgggacccaacgtggtgctcctgggccagatgaacgagttgtttcctgacagcaaggacctcgtgaactttgcttcctggtttgcatttgcctttcccaacatgctggtgatgctgctgttcgcctggctgtggctccagtttgtttacatgttctccagttttaaaaagtcctggggctgcgggctagagagcaagaaaaacgagaaggctgccctcaaggtgctgcaggaggagtaccggaagctggggcccttgtccttcgcggagatcaacgtgctgatctgcttcttcctgctggtcatcctgtggttctcccgagaccccggcttcatgcccggctggctgactgttgcctgggtggagggtgagacaaagtatgtctccgatgccactgtggccatctttgtggccaccctgctattcattgtgccttcacagaagcccaagtttaacttccgcagccagactgaggaaggtaagtctcctgttctgatcgccccccctcccctgctggattggaaggtaacccaggagaaagtgccctggggcatcgtgctgctactagggggcggatttgctctggctaaaggatccgaggcctcggggctgtccgtgtggatggggaagcagatggagcccttgcacgcagtgcccccggcagccatcaccttgatcttgtccttgctcgttgccgtgttcactgagtgcacaagcaacgtggccaccaccaccttgttcctgcccatctttgcctccatgtctcgctccatcggcctcaatccgctgtacatcatgctgccctgtaccctgagtgcctcctttgccttcatgttgcctgtggccacccctccaaatgccatcgtgttcacctatgggcacctcaaggttgctgacatggtgaaaacaggagtcataatgaacataattggagtcttctgtgtgtttttggctgtcaacacctggggacgggccatatttgacttggatcatttccctgactgggctaatgtgacacatattgagacttaggaagagccacaagaccacacacacagcccttaccctcctcaggactaccgaaccttctggcacacctt

SEQ ID NO: 998 - protein, 568 aa, Homo sapiens
MASALSYVSKFKSFVILFVTPLLLLPLVILMPAKVSCAYVIILMAIYWCTEVIPLAVTSLMPVLLFPLFQILDSRQVCVQYMKDTNMLFLGGLIVAVAVERWNLHKRIALRTLLWVGAKPARLMLGFMGVTALLSMWISNTATTAMMVPIVEAILQQMEATSAATEAGLELVDKGKAKELPGSQVIFEGPTLGQQEDQERKRLCKAMTLCICYAASIGGTATLTGTGPNVVLLGQMNELFPDSKDLVNFASWFAFAFPNMLVMLLFAWLWLQFVYMFSSFKKSWGCGLESKKNEKAALKVLQEEYRKLGPLSFAEINVLICFFLLVILWFSRDPGFMPGWLTVAWVEGETKYVSDATVAIFVATLLFIVPSQKPKFNFRSQTEEGKSPVLIAPPPLLDWKVTQEKVPWGIVLLLGGGFALAKGSEASGLSVWMGKQMEPLHAVPPAAITLILSLLVAVFTECTSNVATTTLFLPIFASMSRSIGLNPLYIMLPCTLSASFAFMLPVATPPNAIVFTYGHLKVADMVKTGVIMNIIGVFCVFLAVNTWGRAIFDLDHFPDWANVTHIET

SEQ ID NO: 999 - DNA, 1899 bp, Homo sapiens
  CDS (31)..(1878)
cgtctcgcccgccagtctccctcccgcgcgatggcctcggcgctgagctatgtctccaagttcaagtccttcgtgatcttgttcgtcaccccgctcctgctgctgccactcgtcattctgatgcccgccaaggtcagttgctgtgcctacgtcatcatcctcatggccatttactggtgcacagaagtcatccctctggctgtcacctctctcatgcctgtcttgcttttcccactcttccagattctggactccaggcaggtgtgtgtccagtacatgaaggacaccaacatgctgttcctgggcggcctcatcgtggccgtggctgtggagcgctggaacctgcacaagaggatcgccctgcgcacgctcctctgggtgggggccaagcctgcacggctgatgctgggcttcatgggcgtcacagccctcctgtccatgtggatcagtaacacggcaaccacggccatgatggtgcccatcgtggaggccatattgcagcagatggaagccacaagcgcagccaccgaggccggcctggagggacaaggtaccacaataaacaacctgaatgcactggaggatgatacagtgaaagcagtactaggaggaaagtgtgtagctataataagcacttacgtcaaaaaagtagaaaaacttcaaataaacaatctaatgacacctcttaaaaaactagaaaagcaagagcaacaggacctagggcctggcatcaggcctcaggactctgcccagtgccaggaagaccaagagcggaagaggttgtgtaaggccatgaccctgtgcatctgctacgcggccagcatcgggggcaccgccaccctgaccgggacgggacccaacgtggtgctcctgggccagatgaacgagttgtttcctgacagcaaggacctcgtgaactttgcttcctggtttgcatttgcctttcccaacatgctggtgatgctgctgttcgcctggctgtggctccagtttgtttacatgttctccagttttaaaaagtcctggggctgcgggctagagagcaagaaaaacgagaaggctgccctcaaggtgctgcaggaggagtaccggaagctggggcccttgtccttcgcggagatcaacgtgctgatctgcttcttcctgctggtcatcctgtggttctcccgagaccccggcttcatgcccggctggctgactgttgcctgggtggagggtgagacaaagtcagtctccgatgccactgtggccatctttgtggccaccctgctattcattgtgccttcacagaagcccaagtttaacttccgcagccagactgaggaaggtaagtctcctgttctgatcgccccccctcccctgctggattggaaggtaacccaggagaaagtgccctggggcatcgtgctgctactagggggcggatttgctctggctaaaggatccgaggcctcggggctgtccgtgtggatggggaagcagatggagcccttgcacgcagtgcccccggcagccatcaccttgatcttgtccttgctcgttgccgtgttcactgagtgcacaagcaacgtggccaccaccaccttgttcctgcccatctttgcctccatgtctcgctccatcggcctcaatccgctgtacatcatgctgccctgtaccctgagtgcctcctttgccttcatgttgcctgtggccacccctccaaatgccatcgtgttcacctatgggcacctcaaggttgctgacatggtaaaaacaggagtcataatgaacataattggagtcttctgtgtgtttttggctgtcaacacctggggacgggccatatttgacttggatcatttccctgactgggctaatgtgacacatattgagacttaggaagagccacaagaccac

SEQ ID NO: 1000 - protein, 616 aa, Homo sapiens [sequence omitted]

SEQ ID NO: 1001 - DNA, 1606 bp, Homo sapiens
  CDS (2)..(1567)
gatggcctcggcgctgagctatgtctccaagttcaagtccttcgtgatcttgttcgtcaccccgctcctgctgctgccactcgtcattctgatgcccgccaagtttgtcaggtgtgcctacgtcatcatcctcatggccatttactggtgcacagaagtcatccctctggctgtcacctctctcatgcctgtcttgcttttcccactcttccagattctggactccaggcaggtgtgtgtccagtacatgaaggacaccaacatgctgttcctgggcggcctcatcgtggccgtggctgtggagcgctggaacctgcacaagaggatcgccctgcgcacgctcctctgggtgggggccaagcctgcacggctgatgctgggcttcatgggcgtcacagccctcctgtccatgtggatcagtaacacggcaaccacggccatgatggtgcccatcgtggaggccatattgcagcagatggaagccacaagcgcagccaccgaggccggcctggagctggtggacaagggcaaggccaaggagctgccagggagtcaagtgatttttgaaggccccactctggggcagcaggaagaccaagagcggaagaggttgtgtaaggccatgaccctgtgcatctgctacgcggccagcatcgggggcaccgccaccctgaccgggacgggacccaacgtggtgctcctgggccagatgaacgagttgtttcctgacagcaaggacctcgtgaactttgcttcctggtttgcatttgcctttcccaacatgctggtgatgctgctgttcgcctggctgtggctccagtttgtttacatgagattcaattttaaaaagtcctggggctgcgggctagagagcaagaaaaacgagaaggctgccctcaaggtgctgcaggaggagtaccggaagttggggcccttgtccttcgcggagatcaacgtgctgatctgcttcttcctgctggtcatcctgtggttctcccgagaccccggcttcatgcccggctggctgactgttgcctgggtggagggtgagacaaagtatgtctccgatgccactgtggccatctttgtggccaccctgctattcattgtgccttcacagaagcccaagtttaacttccgcagccagactgaggaagaaaggaaaactccattttatccccctcccctgctggattggaaggtaacccaggagaaagtgccctggggcatcgtgctgctactagggggcggatttgctctggctaaaggatccgaggcctcggggctgtccgtgtggatggggaagcagatggagcccttgcacgcagtgcccccggcagccatcaccttgatcttgtccttgctcgttgccgtgttcactgagtgcacaagcaacgtggccaccaccaccttgttcctgcccatctttgcctccatggtgaaaacaggagtcataatgaacataattggagtcttctgtgtgtttttggctgtcaacacctggggacgggccatatttgacttggatcatttccctgactgggctaatgtgacacatattgagacttaggaagagccacaagaccacacacatagcccttaccct

SEQ ID NO: 1002 - protein, 522 aa, Homo sapiens
MASALSYVSKFKSFVILFVTPLLLLPLVILMPAKFVRCAYVIILMAIYWCTEVIPLAVTSLMPVLLFPLFQILDSRQVCVQYMKDTNMLFLGGLIVAVAVERWNLHKRIALRTLLWVGAKPARLMLGFMGVTALLSMWISNTATTAMMVPIVEAILQQMEATSAATEAGLELVDKGKAKELPGSQVIFEGPTLGQQEDQERKRLCKAMTLCICYAASIGGTATLTGTGPNVVLLGQMNELFPDSKDLVNFASWFAFAFPNMLVMLLFAWLWLQFVYMRFNFKKSWGCGLESKKNEKAALKVLQEEYRKLGPLSFAEINVLICFFLLVILWFSRDPGFMPGWLTVAWVEGETKYVSDATVAIFVATLLFIVPSQKPKFNFRSQTEEERKTPFYPPPLLDWKVTQEKVPWGIVLLLGGGFALAKGSEASGLSVWMGKQMEPLHAVPPAAITLILSLLVAVFTECTSNVATTTLFLPIFASMVKTGVIMNIIGVFCVFLAVNTWGRAIFDLDHFPDWANVTHIET

SEQ ID NO: 1003 - DNA, 1781 bp, Homo sapiens
  CDS (2)..(1549)
gatggcctcggcgctgagctatgtctccaagttcaagtccttcgtgatcttgttcgtcaccccgctcctgctgctgccactcgtcattctgatgcccgccaagtttgtcaggtgtgcctacgtcatcatcctcatggccatttactggtgcacagaagtcatccctctggctgtcacctctctcatgcctgtcttgcttttcccactcttccagattctggactccaggcaggtgtgtgtccagtacatgaaggacaccaacatgctgttcctgggcggcctcatcgtggccgtggctgtggagcgctggaacctgcacaagaggatcgccctgcgcacgctcctctgggtgggggccaagcctgcacggctgatgctgggcttcatgggcgtcacagccctcctgtccatgtggatcagtaacacggcaaccacggccatgatggtgcccatcgtggaggccatattgcagcagatggaagccacaagcgcagccaccgaggccggcctggagctggtggacaagggcaaggccaaggagctgccagggagtcaagtgatttttgaaggccccactctggggcagcaggaagaccaagagcggaagaggttgtgtaaggccatgaccctgtgcatctgctacgcggccagcatcgggggcaccgccaccctgaccgggacgggacccaacgtggtgctcctgggccagatgaacgagttgtttcctgacagcaaggacctcgtgaactttgcttcctggtttgcatttgcctttcccaacatgctggtgatgctgctgttcgcctggctgtggctccagtttgtttacatgagattcaattttaaaaagtcctggggctgcgggctagagagcaagaaaaacgagaaggctgccctcaaggtgctgcaggaggagtaccggaagttggggcccttgtccttcgcggagatcaacgtgctgatctgcttcttcctgctggtcatcctgtggttctcccgagaccccggcttcatgcccggctggctgactgttgcctgggtggagggtgagacaaagtatgtctccgatgccactgtggccatctttgtggccaccctgctattcattgtgccttcacagaagcccaagtttaacttccgcagccagactgaggaagaaaggaaaactccattttatccccctcccctgctggattggaaggtaacccaggagaaagtgccctggggcatcgtgctgctactagggggcggatttgctctggctaaaggatccgaggcctcggggctgtccgtgtggatggggaagcagatggagcccttgcacgcagtgcccccggcagccatcaccttgatcttgtccttgctcgttgccgtgttcactgagtgcacaagcaacgtggccaccaccaccttgttcctgcccatctttgcctccatgaatcacgtccccaagagcttctgtgttctgtacggtgatgttgcagtgctgtctttccgcagtctcgctccatcggcctcaatccgctgtacatcatgctgccctgtaccctgagtgcctcctttgccttcatgttgcctgtggccacccctccaaatgccatcgtgttcacctatgggcacctcaaggttgctgacatggtgaaaacaggagtcataatgaacataattggagtcttctgtgtgtttttggctgtcaacacctggggacgggccatatttgacttggatcatttccctgactgggctaatgtgacacatattgagacttaggaagagccaca

SEQ ID NO: 1004 - protein, 516 aa, Homo sapiens
MASALSYVSKFKSFVILFVTPLLLLPLVILMPAKFVRCAYVIILMAIYWCTEVIPLAVTSLMPVLLFPLFQILDSRQVCVQYMKDTNMLFLGGLIVAVAVERWNLHKRIALRTLLWVGAKPARLMLGFMGVTALLSMWISNTATTAMMVPIVEAILQQMEATSAATEAGLELVDKGKAKELPGSQVIFEGPTLGQQEDQERKRLCKAMTLCICYAASIGGTATLTGTGPNVVLLGQMNELFPDSKDLVNFASWFAFAFPNMLVMLLFAWLWLQFVYMRFNFKKSWGCGLESKKNEKAALKVLQEEYRKLGPLSFAEINVLICFFLLVILWFSRDPGFMPGWLTVAWVEGETKYVSDATVAIFVATLLFIVPSQKPKFNFRSQTEEERKTPFYPPPLLDWKVTQEKVPWGIVLLLGGGFALAKGSEASGLSVWMGKQMEPLHAVPPAAITLILSLLVAVFTECTSNVATTTLFLPIFASMNHVPKSFCVLYGDVAVLSFRSLAPSASIRCTSCCPVP

SEQ ID NO: 1005 - DNA, 5115 bp, Homo sapiens
  CDS (327)..(5105)
gaattccgggagcgggcgggctgcgaggccgcggggcatgcgggaggcggaggggtgggaccgggtggctgcgcccattccacacccgccgaaagcggacactgtcagctgaatcactccccttttaggaggagggagggggaaaaggtgtctagctaatttctgcttaaaaaagcacaggagatcgcgggtcagctttgcagtcgctgccttctcgcgcctgaccatgcacccctgcatcttcctgctgggcacaggcgagcgctttatttctggagctgagggctaaaacttttttcacttttcttctcctcaacatctgaatcatgccatgtgcccagaggagctggcttgcaaacctttccgtggtggctcagctccttaactttggggcgctttgctatgggagacagcctcagccaggcccggttcgcttcccggacaggaggcaagagcattttatcaagggcctgccagaataccacgtggtgggtccagtccgagtagatgccagtgggcattttttgtcatatggcttgcactatcccatcacgagcagcaggaggaagagagatttggatggctcagaggactgggtgtactacagaatttctcacgaggagaaggacctgttttttaacttgacggtcaatcaaggatttctttccaatagctacatcatggagaagagatatgggaacctctcccatgttaagatgatggcttcctctgcccccctctgccatctcagtggcacggttctacagcagggcaccagagttgggacggcagccctcagtgcctgccatggactgactggatttttccaactaccacatggagactttttcattgaacccgtgaagaagcatccactggttgagggagggtaccacccgcacatcgtttacaggaggcagaaagttccagaaaccaaggagccaacctgtggattaaaggacagtgttaacatctcccagaagcaagagctatggcgggagaagtgggagaggcacaacttgccaagcagaagcctctctcggcgttccatcagcaaggagagatgggtggagacactggtggtggccgacacaaagatgattgaataccatgggagtgagaatgtggagtcctacatcctcaccatcatgaacatggtcactgggttgttccataacccaagcattggcaatgcaattcacattgttgtggttcggctcattctactcgaagaagaagagcaaggactgaaaatagttcaccatgcagaaaagacactgtctagcttctgcaagtggcagaagagtatcaatcccaagagtgacctcaatcctgttcatcacgacgtggctgtccttctcaccagaaaggacatctgtgctggtttcaatcgcccctgcgagaccctgggcctgtctcacctttcaggaatgtgtcagcctcaccgcagttgtaacatcaatgaagattcgggactccctctggctttcacaattgcccatgagctaggacacagcttcggcatccagcatgatgggaaagaaaatgactgtgagcctgtgggcagacatccgtacatcatgtcccgccagctccagtacgatcccactccgctgacatggtccaagtgcagcgaggagtacatcacccgcttcttggaccgaggctgggggttctgtcttgatgacatacctaaaaagaaaggcttgaagtccaaggtcattgcccccggagtgatctatgatgttcaccaccagtgccagctacaatatggacccaatgctaccttctgccaggaagtagaaaacgtctgccagacactgtggtgctccgtgaagggcttttgtcgctctaagctggacgctgctgcagatggaactcaatgtggtgagaagaagtggtgtatggcaggcaagtgcatcacagtggggaagaaaccagagagcattcctggaggctggggccgctggtcaccctggtcccactgttccaggacctgtggggctggagtccagagcgcagagaggctctgcaacaaccccgagccaaagtttggagggaaatattgcactggagaaagaaaacgctatcgcttgtgcaacgtccacccctgtcgctcagaggcaccaacatttcggcagatgcagtgcagtgaatttgacactgttccctacaagaatgaactctaccactggtttcccatttttaacccagcacatccttgtgagctctactgccgacccatagatggccagttttctgagaaaatgctggatgctgtcattgatggtaccccttgctttgaaggcggcaacagcagaaatgtctgtattaatggcatatgtaagatggttggctgtgactatgagatcgattccaatgccaccgaggatcgctgcggtgtgtgcctgggagatggctcttcctgccagactgtgagaaagatgtttaagcagaaggaaggatctggttatgttgacattgggctcattccaaaaggagcaagggacataagagtgatggaaattgagggagctggaaacttcctggccatcaggagtgaagatcctgaaaaatattacctgaatggagggtttattatccagtggaacgggaactataagctggcagggactgtctttcagtatgacaggaaaggagacctggaaaagctgatggccacaggtcccaccaatgagtctgtgtggatccagcttctattccaggtgactaaccctggcatcaagtatgagtacacaatccagaaagatggccttgacaatgatgttgagcagatgtacttctggcagtacggccactggacagagtgcagtgtgacctgcgggacaggtatccgccgccaaactgcccattgcataaagaagggccgcgggatggtgaaagctacattctgtgacccagaaacacagcccaatgggagacagaagaagtgccatgaaaaggcttgtccacccaggtggtgggcaggggagtgggaagcatgctcggcgacatgcgggccccacggggagaagaagcgaaccgtgctgtgcatccagaccatggtctctgacgagcaggctctcccgcccacagactgccagcacctgctgaagcccaagaccctcctttcctgcaacagagacatcctgtgcccctcggactggacagtgggcaactggagtgagtgttctgtttcctgtggtggtggagtgcggattcgcagtgtcacatgtgccaagaaccatgatgaaccttgcgatgtgacaaggaaacccaacagccgagctctgtgtggcctccagcaatgcccttctagccggagagttctgaaaccaaacaaaggcactatttccaatggaaaaaacccaccaacactaaagcccgtccctccacctacatccaggcccagaatgctgaccacacccacagggcctgagtctatgagcacaagcactccagcaatcagcagccctagtcctaccacagcctccaaagaaggagacctgggtgggaaacagtggcaagatagctcaacccaacctgagctgagctctcgctatctcatttccactggaagcacttcccagcccatcctcacttcccaatccttgagcattcagccaagtgaggaaaatgtttccagttcagatactggtcctacctcggagggaggccttgtagctacaacaacaagtggttctggcttgtcatcttcccgcaaccctatcacttggcctgtgactccattttacaataccttgaccaaaggtccagaaatggagattcacagtggctcaggggaagaaagagaacagcctgaggacaaagatgaaagcaatcctgtaatatggaccaagatcagagtacctggaaatgacgctccagtggaaagtacagaaatgccacttgcacctccactaacaccagatctcagcagggagtcctggtggccacccttcagcacagtaatggaaggactgctccccagccaaaggcccactacttccgaaactgggacacccagagttgaggggatggttactgaaaagccagccaacactctgctccctctgggaggagaccaccagccagaaccctcaggaaagacggcaaaccgtaaccacctgaaacttccaaacaacatgaaccaaacaaaaagttctgaaccagtcctgactgaggaggatgcaacaagtctgattactgagggctttttgctaaatgcctccaattacaagcagctcacaaacggccacggctctgcacactggatcgtcggaaactggagcgagtgctccaccacatgtggcctgggggcctactggaaaagggtggagtgcaccacccagatggattctgactgtgcggccatccagagacctgaccctgcaaaaagatgccacctccgtccctgtgctggctggaaagtgggaaactggagcaagtgctccagaaactgcagtgggggcttcaagatacgcgagattcagtgcgtggacagccgggaccaccggaacctgaggccatttcactgccagttcctggccggcattcctcccccattgagcatgagctgtaacccggagccctgtgaggcgtggcaggtggagccttggagccagtgctccaggtcctgtggaggtggagttcaggagagaggagtgttctgtccaggaggcctctgtgattggacaaaaagacccacatccaccatgtcttgcaatgagcacctgtgctgtcactgggccactgggaactgggacctgtgttccacttcctgtggaggtggctttcagaagaggattgtccaatgtgtgccctcagagggcaataaaactgaagaccaagaccaatgtctatgtgatcacaaacccagacctccagaattcaaaaaatgcaaccagcaggcctgcaagaaaagtgccgatttactttgcactaaggacaaactgtcagccagtttctgccagacactgaaagccatgaagaaatgttctgtgcccaccgtgagggctgagtgctgcttctcgtgtccccagacacacatcacacacacccaaaggcaaagaaggcaacggttgctccaaaagtcaaaagaactctaagcccaaa

SEQ ID NO: 1006 - protein, 1593 aa, Homo sapiens
MPCAQRSWLANLSVVAQLLNFGALCYGRQPQPGPVRFPDRRQEHFIKGLPEYHVVGPVRVDASGHFLSYGLHYPITSSRRKRDLDGSEDWVYYRISHEEKDLFFNLTVNQGFLSNSYIMEKRYGNLSHVKMMASSAPLCHLSGTVLQQGTRVGTAALSACHGLTGFFQLPHGDFFIEPVKKHPLVEGGYHPHIVYRRQKVPETKEPTCGLKDSVNISQKQELWREKWERHNLPSRSLSRRSISKERWVETLVVADTKMIEYHGSENVESYILTIMNMVTGLFHNPSIGNAIHIVVVRLILLEEEEQGLKIVHHAEKTLSSFCKWQKSINPKSDLNPVHHDVAVLLTRKDICAGFNRPCETLGLSHLSGMCQPHRSCNINEDSGLPLAFTIAHELGHSFGIQHDGKENDCEPVGRHPYIMSRQLQYDPTPLTWSKCSEEYITRFLDRGWGFCLDDIPKKKGLKSKVIAPGVIYDVHHQCQLQYGPNATFCQEVENVCQTLWCSVKGFCRSKLDAAADGTQCGEKKWCMAGKCITVGKKPESIPGGWGRWSPWSHCSRTCGAGVQSAERLCNNPEPKFGGKYCTGERKRYRLCNVHPCRSEAPTFRQMQCSEFDTVPYKNELYHWFPIFNPAHPCELYCRPIDGQFSEKMLDAVIDGTPCFEGGNSRNVCINGICKMVGCDYEIDSNATEDRCGVCLGDGSSCQTVRKMFKQKEGSGYVDIGLIPKGARDIRVMEIEGAGNFLAIRSEDPEKYYLNGGFIIQWNGNYKLAGTVFQYDRKGDLEKLMATGPTNESVWIQLLFQVTNPGIKYEYTIQKDGLDNDVEQMYFWQYGHWTECSVTCGTGIRRQTAHCIKKGRGMVKATFCDPETQPNGRQKKCHEKACPPRWWAGEWEACSATCGPHGEKKRTVLCIQTMVSDEQALPPTDCQHLLKPKTLLSCNRDILCPSDWTVGNWSECSVSCGGGVRIRSVTCAKNHDEPCDVTRKPNSRALCGLQQCPSSRRVLKPNKGTISNGKNPPTLKPVPPPTSRPRMLTTPTGPESMSTSTPAISSPSPTTASKEGDLGGKQWQDSSTQPELSSRYLISTGSTSQPILTSQSLSIQPSEENVSSSDTGPTSEGGLVATTTSGSGLSSSRNPITWPVTPFYNTLTKGPEMEIHSGSGEEREQPEDKDESNPVIWTKIRVPGNDAPVESTEMPLAPPLTPDLSRESWWPPFSTVMEGLLPSQRPTTSETGTPRVEGMVTEKPANTLLPLGGDHQPEPSGKTANRNHLKLPNNMNQTKSSEPVLTEEDATSLITEGFLLNASNYKQLTNGHGSAHWIVGNWSECSTTCGLGAYWKRVECTTQMDSDCAAIQRPDPAKRCHLRPCAGWKVGNWSKCSRNCSGGFKIREIQCVDSRDHRNLRPFHCQFLAGIPPPLSMSCNPEPCEAWQVEPWSQCSRSCGGGVQERGVFCPGGLCDWTKRPTSTMSCNEHLCCHWATGNWDLCSTSCGGGFQKRIVQCVPSEGNKTEDQDQCLCDHKPRPPEFKKCNQQACKKSADLLCTKDKLSASFCQTLKAMKKCSVPTVRAECCFSCPQTHITHTQRQRRQRLLQKSKEL

SEQ ID NO: 1007 - DNA, 1068 bp, Homo sapiens
  CDS (1)..(1068)
aagcttaacttgacggtcaatcaaggatttctttccaatagctacatcatggagaagagatatgggaacctctcccatgttaagatgatggcttcctctgcccccctctgccatctcagtggcacggttctacagcagggcaccagagttgggatggcagccctcagtgcctgccatggactgactggatttttccaactaccacatggagactttttcattgaacccgtgaagaagcatccactggttgagggagggtaccacccgcacatcgtttacaggaggcagaaagttccagaaaccaaggagccaacctgtggattaaaggacagtgttaacatctcccagaagcaagagctatggcgggagaagtgggagaggcacaacttgccaagcagaagcctctctcggcgttccatcagcaaggagagatgggtggagacactggtggtggccgacacaaagatgattgaataccatgggagtgagaatgtggagtcctgcatcctcaccatcatgaacatggtcactgggttgttccataacccaagcattggcaatgcaattcacattgttgtggttcggctcattctactcgaagaagaagagcaaggactgaaaatagttcaccatgcagaaaagacactgtctagcttctgcaagtggcagaagagtatcaatcccaagagtgacctcaatcctgttcatcacgacgtggctgtccttctcaccagaaaggacatctgtgctggtttcaatcgcccctgcgagaccctgggcctgtctcacctttcaggaatgtgtcagcctcaccgcagttgtaacatcaatgaagattcgggactccctctggctttcacaattgcccatgagctaggacacagcttcggcatccagcatgatgggaaagaaaatgactgtgagcctgtgggcagacatccgtacatcatgtcccgccagctccagtacgatcccactccgctgacatggtccaagtgcagcgaggagtacatcacccgcttcttggaccgaggctgggggttctgtcttgatgacatacctctcgag

SEQ ID NO: 1008 - protein, 356 aa, Homo sapiens
KLNLTVNQGFLSNSYIMEKRYGNLSHVKMMASSAPLCHLSGTVLQQGTRVGMAALSACHGLTGFFQLPHGDFFIEPVKKHPLVEGGYHPHIVYRRQKVPETKEPTCGLKDSVNISQKQELWREKWERHNLPSRSLSRRSISKERWVETLVVADTKMIEYHGSENVESCILTIMNMVTGLFHNPSIGNAIHIVVVRLILLEEEEQGLKIVHHAEKTLSSFCKWQKSINPKSDLNPVHHDVAVLLTRKDICAGFNRPCETLGLSHLSGMCQPHRSCNINEDSGLPLAFTIAHELGHSFGIQHDGKENDCEPVGRHPYIMSRQLQYDPTPLTWSKCSEEYITRFLDRGWGFCLDDIPLE

SEQ ID NO: 1009 - DNA, 1068 bp, Homo sapiens
  CDS (1)..(1068)
aagcttaacttgacggtcaatcaaggatttctttccaatagctacatcatggagaagagatatgggaacctctcccatgttaagatgatggcttcctctgcccccctctgccatctcagtggcacggttctacagcagggcaccagagttgggacggcagccctcagtgcctgccatggactgactggatttttccaactaccacatggagactttttcattgaacccgtgaagaagcatccactggttgagggagggtaccacccgcacatcgtttacaggaggcagaaagttccagaaaccaaggagccaacctgtggattaaaggacagtgttaacatctcccagaagcaagagctatggcgggagaagtgggagaggcacaacttgccaagcagaagcctctctcggcgttccatcagcaaggagagatgggtggagacactggtggtggccgacacaaagatgattgaataccatgggagtgagaatgtggagtcctacatcctcaccatcatgaacatgatcactgggttgttccataacccaagcattggcaatgcaattcacattgttgtggttcggctcattctactcgaagaagaagagcaaggactgaaaatagttcaccatgcagaaaagacactgtctagcttctgcaagtggcagaagagtatcaatcccaagagtgacctcaatcctgttcatcacgacgtggctgtccttctcaccagaaaggacatctgtgctggtttcaatcgcccctgcgagaccctgggcctgtctcacctttcaggaatgtgtcagcctcaccgcagttgtaacatcaatgaagattcgggactccctctggctttcacaattgcccatgagctaggacacagcttcggcatccagcatgatgggaaagaaaatgactgtgagcctgtgggcagacatccgtacatcatgtcccgccagctccagtacgatcccactccgctgacatggtccaagtgcagcgaggagtacatcacccgcttcttggaccgaggctgggggttctgtcttgatgacatacctctcgag

SEQ ID NO: 1010 - protein, 356 aa, Homo sapiens
KLNLTVNQGFLSNSYIMEKRYGNLSHVKMMASSAPLCHLSGTVLQQGTRVGTAALSACHGLTGFFQLPHGDFFIEPVKKHPLVEGGYHPHIVYRRQKVPETKEPTCGLKDSVNISQKQELWREKWERHNLPSRSLSRRSISKERWVETLVVADTKMIEYHGSENVESYILTIMNMITGLFHNPSIGNAIHIVVVRLILLEEEEQGLKIVHHAEKTLSSFCKWQKSINPKSDLNPVHHDVAVLLTRKDICAGFNRPCETLGLSHLSGMCQPHRSCNINEDSGLPLAFTIAHELGHSFGIQHDGKENDCEPVGRHPYIMSRQLQYDPTPLTWSKCSEEYITRFLDRGWGFCLDDIPLE

SEQ ID NO: 1011 - DNA, 1068 bp, Homo sapiens
  CDS (1)..(1068)
aagcttaacttgacggtcaatcaaggatttctttccaatagctacatcatggagaagagatatgggaacctctcccatgttaagatgatggcttcctctgcccccctctgccatctcagtggcacggttctacagcagggcaccagagttgggacggcagccctcagtgcctgccatggactgactggatttttccaactaccacatggagactttttcattgaacccgtgaagaagcatccactggttgagggagggtaccacccgcacatcgtttacaggaggcagaaagttccagaaaccaaggagccaacctgtggattaaaggacagtgttaacatctcccagaagcaagagctatggcgggagaagtgggagaggcacaacttgccaagcagaagcctctctcggcgttccatcagcaaggagagatgggtggagacactggtggtggccgacacaaagatgattgaataccatgggagtgagaatgtggagtcctacatcctcaccatcatgaacatggtcactgggttgttccataacccaagcattggcaatgcaattcacattgttgtggttcggctcattctactcgaagaagaagagcaaggactgaaaatagttcaccatgcagaaaagacactgtctagcttctgcaagtggcagaagagtatcaatcccaagagtgacctcaatcctgttcatcacgacgtggctgtccttctcaccagaaaggacatctgtgctggtttcaatcgcccctgcgagaccctgggcctgtctcacctttcaggaatgtgtcagcctcaccgcagttgtaacatcaatgaagattcgggactccctctggctttcacaattgcccatgagctaggacacagcttcggcatccagcatgatgggaaagaaaatgactgtgagcctgtgggcagacatccgtacatcatgtcccgccagctccagtacgatcccactccgctgacatggtccaagtgcagcgaggagtacatcacccgcttcttggaccgaggctgggggttctgtcttgatgacatacctctcgag

SEQ ID NO: 1012 - protein, 356 aa, Homo sapiens
KLNLTVNQGFLSNSYIMEKRYGNLSHVKMMASSAPLCHLSGTVLQQGTRVGTAALSACHGLTGFFQLPHGDFFIEPVKKHPLVEGGYHPHIVYRRQKVPETKEPTCGLKDSVNISQKQELWREKWERHNLPSRSLSRRSISKERWVETLVVADTKMIEYHGSENVESYILTIMNMVTGLFHNPSIGNAIHIVVVRLILLEEEEQGLKIVHHAEKTLSSFCKWQKSINPKSDLNPVHHDVAVLLTRKDICAGFNRPCETLGLSHLSGMCQPHRSCNINEDSGLPLAFTIAHELGHSFGIQHDGKENDCEPVGRHPYIMSRQLQYDPTPLTWSKCSEEYITRFLDRGWGFCLDDIPLE

SEQ ID NO: 1013 - DNA, 4777 bp, Homo sapiens
  CDS (1)..(4728)
agatcttatgggagacagcctcagccaggcccggttcgcttcccggacaggaggcaagagcattttatcaagggcctgccagaataccacgtggtgggtccagtccgagtagatgccagtgggcattttttgtcatatggcttgcactatcccatcacgagcagcaggaggaagagagatttggatggctcagaggactgggtgtactacagaatttctcacgaggagaaggacctgttttttaacttgacggtcaatcaaggatttctttccaatagctacatcatggagaagagatatgggaacctctcccatgttaagatgatggcttcttctgcccccctctgccatctcaatggcacggttctacagcagggcaccagagttgggacggcagccctcagtgcctgccatggactgactggatttttccaactaccacatggagactttttcattgaacccgtgaagaagcatccactggttgagggagggtaccacccgcacatcgtttacaggaggcagaaagttccagaaaccaaggagccaacctgtggattaaaggacagtgttaacatctcccagaagcaagagctatggcgggagaagtgggagaggcacaacttgccaagcagaagcctctctcggcgttccatcagcaaggagagatgggtggagacactggtggtggccgacacaaagatgattgaataccatgggagtgagaatgtggagtcctacatcctcaccatcatgaacatggtcactgggttgttccataacccaagcattggcaatgcaattcacattgttgtggttcggctcattctactcgaagaagaagagcaaggactgaaaatagttcaccatgcagaaaagacactgtctagcttctgcaagtggcagaagagtatcaatcccaagagtgacctcaatcctgttcatcacgacgtggctgtccttctcaccagaaaggacatctgtgctggtttcaatcgcccctgcgagaccctgggcctgtctcacctttcaggaatgtgtcagcctcaccgcagttgtaacatcaatgaagattcgggactccctctggctttcacaattgcccatgagctaggacacagcttcggcatccagcatgatgggaaagaaaatgactgtgagcctgtgggcagacatccgtacatcatgtcccgccagctccagtacgatcccactccgctgacatggtccaagtgcagcgaggagtacatcacccgcttcttggaccgaggctgggggttctgtcttgatgacatacctaaaaagaaaggcttgaagtccaaggtcattgcccccggagtgatctatgatgttcaccaccagtgccagctacaatatggacccaatgctaccctctgccaggaagtagaaaacgtctgccagacactgtggtgctccgtgaagggcttttgtcgctctaagctggacgctgctgcagatggaactcaatgtggtgagaagaagtggtgtatggcaggcaagtgcatcacagtggggaagaaaccagagagcattcctggaggctggggccgctggtcaccctggtcccactgttccaggacctgtggggctggagtccagagcgcagagaggctctgcaacaaccccgagccaaagtttggagggaaatattgcactggagaaagaaaacgctatcgcttgtgcaacgtccacccctgtcgctcagaggcaccaacatttcggcagatgcagtgcagtgaatttgacactgttccctacaagaatgaactctaccactggtttcccatttttaacccagcacatccttgtgagctctactgccgacccatagatggccagttttctgagaaaatgctggatgctgtcattgatggtaccccttgctttgaaggcggcaacagcagaaatgtctgtattaatggcatatgtaagatggttggctgtgactatgagatcgattccaatgccaccgaggatcgctgcggtgtgtgcctgggagatggctcttcctgccagactgtgagaaagatgtttaagcagaaggaaggatctggttatgttgacattgggctcattccaaaaggagcaagggacataagagtgatggaaattgagggagctggaaacttcctggccatcaggagtgaagatcctgaaaaatattacctgaatggagggtttattatccagtggaacgggaactataagctggcagggactgtctttcagtatgacaggaaaggagacctggaaaagctgatggccacaggtcccaccaatgagtctgtgtggatccagcttctattccaggtgactaaccctggcatcaagtatgagtacacaatccagaaagatggccttgacaatgatgttgagcagcagatgtacttctggcagtacggccactggacagagtgcagtgtgacctgcgggacaggtatccgccgccaaactgcccattgcataaagaagggccgcgggatggtgaaagctacattctgtgacccagaaacacagcccaatgggagacagaagaagtgccatgaaaaggcttgtccacccaggtggtgggcaggggagtgggaagcatgctcggcgacatgcgggccccacggggagaagaagcgaaccgtgctgtgcatccagaccatggtctctgacgagcaggctctcccgcccacagactgccagcacctgctgaagcccaagaccctcctttcctgcaacagagacatcctgtgcccctcggactggacagtgggcaactggagtgagtgttctgtttcctgtggtggtggagtgcggattcgcagtgtcacatgtgccaagaaccatgatgaaccttgcgatgtgacaaggaaacccaacagccgagctctgtgtggcctccagcaatgcccttctagccggagagttctgaaaccaaacaaaggcactatttccaatggaaaaaacccaccaacactaaagcccgtccctccacctacatccaggcccagaatgctgaccacacccacagggcctgagtctatgagcacaagcactccagcaatcagcagccctagtcctaccacagcctccaaagaaggagacctgggtgggaaacagtggcaagatagctcaacccaacctgagctgagctctcgctatctcatttccactggaagcacttcccagcccatcctcacttcccaatccttgagcattcagccaagtgaggaaaatgtttccagttcagatactggtcctacctcggagggaggccttgtagctacaacaacaagtggttctggcttgtcatcttcccgcaaccctatcacttggcctgtgactccattttacaataccttgaccaaaggtccagaaatggagattcacagtggctcaggggaagaaagagaacagcctgaggacaaagatgaaagcaatcctgtaatatggaccaagatcagagtacctggaaatgacgctccagtggaaagtacagaaatgccacttgcacctccactaacaccagatctcagcagggagtcctggtggccacccttcagcacagtaatggaaggactgctccccagccaaaggcccactacttccgaaactgggacacccagagttgaggggatggttactgaaaagccagccaacactctgctccctctgggaggagaccaccagccagaaccctcaggaaagacggcaaaccgtaaccacctgaaacttccaaacaacatgaaccaaacaaaaagttctgaaccagtcctgactgaggaggatgcaacaagtctgattactgagggctttttgctaaatgcctccaattacaagcagctcacaaacggccacggctctgcacactggatcgtcggaaactggagcgagtgctccaccacatgtggcctgggggcctactggagaagggtggagtgcagcacccagatggattctgactgtgcggccatccagagacctgaccctgcaaaaagatgccacctccgtccctgtgctggctggaaagtgggaaactggagcaagtgctccagaaactgcagtgggggcttcaagatacgcgagattcagtgcgtggacagccgggaccaccggaacctgaggccatttcactgccagttcctggccggcattcctcccccattgagcatgagctgtaacccggagccctgtgaggcgtggcaggtggagccttggagccagtgctccaggtcctgtggaggtggagttcaggagagaggagtgttctgtccaggaggcctctgtgattggacaaaaagacccacatccaccatgtcttgcaatgagcacctgtgctgtcactgggccactgggaactgggacctgtgttccacttcctgtggaggtggctttcagaagaggactgtccaatgtgtgccctcagagggcaataaaactgaagaccaagaccaatgtctatgtgatcacaaacccagacctccagaattcaaaaaatgcaaccagcaggcctgcaagaaaagtgccgatttactttgcactaaggacaaactgtcagccagtttctgccagacactgaaagccatgaagaaatgttctgtgcccaccgtgagggctgagtgctgcttctcgtgtccccagacacacatcacacacacccaaaggcaaagaaggcaacggttgctccaaaagtcaaaagaactcctcgaggagttcttttgacttttggagcaaccgggcctggctgaggctgtctcccataagatct

SEQ ID NO: 1014 - protein, 1576 aa, Homo sapiens
RSYGRQPQPGPVRFPDRRQEHFIKGLPEYHVVGPVRVDASGHFLSYGLHYPITSSRRKRDLDGSEDWVYYRISHEEKDLFFNLTVNQGFLSNSYIMEKRYGNLSHVKMMASSAPLCHLNGTVLQQGTRVGTAALSACHGLTGFFQLPHGDFFIEPVKKHPLVEGGYHPHIVYRRQKVPETKEPTCGLKDSVNISQKQELWREKWERHNLPSRSLSRRSISKERWVETLVVADTKMIEYHGSENVESYILTIMNMVTGLFHNPSIGNAIHIVVVRLILLEEEEQGLKIVHHAEKTLSSFCKWQKSINPKSDLNPVHHDVAVLLTRKDICAGFNRPCETLGLSHLSGMCQPHRSCNINEDSGLPLAFTIAHELGHSFGIQHDGKENDCEPVGRHPYIMSRQLQYDPTPLTWSKCSEEYITRFLDRGWGFCLDDIPKKKGLKSKVIAPGVIYDVHHQCQLQYGPNATLCQEVENVCQTLWCSVKGFCRSKLDAAADGTQCGEKKWCMAGKCITVGKKPESIPGGWGRWSPWSHCSRTCGAGVQSAERLCNNPEPKFGGKYCTGERKRYRLCNVHPCRSEAPTFRQMQCSEFDTVPYKNELYHWFPIFNPAHPCELYCRPIDGQFSEKMLDAVIDGTPCFEGGNSRNVCINGICKMVGCDYEIDSNATEDRCGVCLGDGSSCQTVRKMFKQKEGSGYVDIGLIPKGARDIRVMEIEGAGNFLAIRSEDPEKYYLNGGFIIQWNGNYKLAGTVFQYDRKGDLEKLMATGPTNESVWIQLLFQVTNPGIKYEYTIQKDGLDNDVEQQMYFWQYGHWTECSVTCGTGIRRQTAHCIKKGRGMVKATFCDPETQPNGRQKKCHEKACPPRWWAGEWEACSATCGPHGEKKRTVLCIQTMVSDEQALPPTDCQHLLKPKTLLSCNRDILCPSDWTVGNWSECSVSCGGGVRIRSVTCAKNHDEPCDVTRKPNSRALCGLQQCPSSRRVLKPNKGTISNGKNPPTLKPVPPPTSRPRMLTTPTGPESMSTSTPAISSPSPTTASKEGDLGGKQWQDSSTQPELSSRYLISTGSTSQPILTSQSLSIQPSEENVSSSDTGPTSEGGLVATTTSGSGLSSSRNPITWPVTPFYNTLTKGPEMEIHSGSGEEREQPEDKDESNPVIWTKIRVPGNDAPVESTEMPLAPPLTPDLSRESWWPPFSTVMEGLLPSQRPTTSETGTPRVEGMVTEKPANTLLPLGGDHQPEPSGKTANRNHLKLPNNMNQTKSSEPVLTEEDATSLITEGFLLNASNYKQLTNGHGSAHWIVGNWSECSTTCGLGAYWRRVECSTQMDSDCAAIQRPDPAKRCHLRPCAGWKVGNWSKCSRNCSGGFKIREIQCVDSRDHRNLRPFHCQFLAGIPPPLSMSCNPEPCEAWQVEPWSQCSRSCGGGVQERGVFCPGGLCDWTKRPTSTMSCNEHLCCHWATGNWDLCSTSCGGGFQKRTVQCVPSEGNKTEDQDQCLCDHKPRPPEFKKCNQQACKKSADLLCTKDKLSASFCQTLKAMKKCSVPTVRAECCFSCPQTHITHTQRQRRQRLLQKSKELLEEFF

SEQ ID NO: 1015 - DNA, 4777 bp, Homo sapiens
  CDS (1)..(4728)
agatcttatgggagacagcctcagccaggcccggttcgcttcccggacaggaggcaagagcattttatcaagggcctgccagaataccacgtggtgggtccagtccgagtagatgccagtgggcattttttgtcatatggcttgcactatcccatcacgagcagcaggaggaagagagatttggatggctcagaggactgggtgtactacagaatttctcacgaggagaaggacctgttttttaacttgacggtcaatcaaggatttctttccaatagctacatcatggagaagagatatgggaacctctcccatgttaagatgatggcttcctctgcccccctctgccatctcagtggcacggttctacagcagggcaccagagttgggacggcagccctcagtgcctgccatggactgactggatttttccaactaccacatggagactttttcattgaacccgtgaagaagcatccactggttgagggagggtaccacccgcacatcgtttacaggaggcagaaagttccagaaaccaaggagccaacctgtggattaaaggacagtgttaacatctcccagaagcaagagctatggcgggagaagtgggagaggcacaacttgccaagcagaagcctctctcggcgttccatcagcaaggagagatgggtggagacactggtggtggccgacacaaagatgattgaataccatgggagtgagaatgtggagtcctacatcctcaccatcatgaacatggtcactgggttgttccataacccaagcattggcaatgcaattcacattgttgtggttcggctcattctactcgaagaagaagagcaaggactgaaaatagttcaccatgcagaaaagacactgtctagcttctgcaagtggcagaagagtatcaatcccaagagtgacctcaatcctgttcatcacgacgtggctgtccttctcactagaaaggacatctgtgctggtttcaatcgcccctgcgagaccctgggcctgtctcacctttcaggaatgtgtcagcctcaccgcagttgtaacatcaatgaagattcgggactccctctggctttcacaattgcccatgagctaggacacagcttcggcatccagcatgatgggaaagaaaatgactgtgagcctgtgggcagacatccgtacatcatgtcccgccagctccagtacgatcccactccgctgacatggtccaagtgcagcgaggagtacatcacccgcttcttggaccgaggctgggggttctgtcttgatgacatacctaaaaagaaaggcttgaagtccaaggtcattgcccccggagtgatctatgatgttcaccaccagtgccagctacaatatggacccaatgctaccttctgccaggaagtagaaaacgtctgccagacactgtggtgctccgtgaagggcttttgtcgctctaagctggacgctgctgcagatggaactcaatgtggtgagaagaagtggtgtatggcaggcaagtgcatcacagtggggaagaaaccagagagcattcctggaggctggggccgctggtcaccctggtcccactgttccaggacctgtggggctggagtccagagcgcagagaggctctgcaacaaccccgagccaaagtttggagggaaatattgcactggagaaagaaaacgctatcgcttgtgcaacgtccacccctgtcgctcagaggcaccaacatttcggcagatgcagtgcagtgaatttgacactgttccctacaagaatgaactctaccactggtttcccatttttaacccagcacatccttgtgagctctactgccgacccatagatggccagttttctgagaaaatgctggatgctgtcattgatggtaccccttgctttgaaggcggcaacagcagaaatgtctgtattaatggcatatgtaagatggttggctgtgactatgagatcgattccaatgccaccgaggatcgctgcggtgtgtgcctgggagatggctcttcctgccagactgtgagaaagatgtttaagcagaaggaaggatctggttatgttgacattgggctcattccaaaaggagcaagggacataagagtgatggaaattgagggagctggaaacttcctggccatcaggagtgaagatcctgaaaaatattacctgaatggagggtttattatccagtggaacgggaactataagctggcagggactgtctttcagtatgacaggaaaggagacctggaaaagctgatggccacaggtcccaccaatgagtctgtgtggatccagcttctattccaggtgactaaccctggcatcaagtatgagtacacaatccagaaagatggccttgacaatgatgttgagcagcagatgtacttctggcagtacggccactggacagagtgcagtgtgacctgcgggacaggtatccgccgccaaactgcccattgcataaagaagggccgcgggatggtgaaagctacattctgtgacccagaaacacagcccaatgggagacagaagaagtgccatgaaaaggcttgtccacccaggtggtgggcaggggagtgggaagcatgctcggcgacatgcgggccccacggggagaagaagcgaaccgtgctgtgcatccagaccatggtctctgacgagcaggctctcccgcccacagactgccagcacctgctgaagcccaagaccctcctttcctgcaacagagacatcctgtgcccctcggactggacagtgggcaactggagtgagtgttctgtttcctgtggtggtggagtgcggattcgcagtgtcacatgtgccaagaaccatgatgaaccttgcgatgtgacaaggaaacccaacagccgagctctgtgtggcctccagcaatgcccttctagccggagagttctgaaaccaaacaaaggcactatttccaatggaaaaaacccaccaacactaaagcccgtccctccacctacatccaggcccagaatgctgaccacacccacagggcctgagtctatgagcacaagcactccagcaatcagcagccctagtcctaccacagcctccaaagaaggagacctgggtgggaaacagtggcaagatagctcaacccaacctgagctgagctctcgctatctcatttccactggaagcacttcccagcccatcctcacttcccaatccttgagcattcagccaagtgaggaaaatgtttccagttcagatactggtcctacctcggagggaggccttgtagctacaacaacaagtggttctggcttgtcatcttcccgcaaccctatcacttggcctgtgactccattttacaataccttgaccaaaggtccagaaatggagattcacagtggctcaggggaagaaagagaacagcctgaggacaaagatgaaagcaatcctgtaatatggaccaagatcagagtacctggaaatgacgctccagtggaaagtacagaaatgccacttgcacctccactaacaccagatctcagcagggagtcctggtggccacccttcagcacagtaatggaaggactgctccccagccaaaggcccactacttccgaaactgggacacccagagttgaggggatggttactgaaaagccagccaacactctgctccctctgggaggagaccaccagccagaaccctcaggaaagacggcaaaccgtaaccacctgaaacttccaaacaacatgaaccaaacaaaaagttctgaaccagtcctgactgaggaggatgcaacaagtctgattactgagggctttttgctaaatgcctccaattacaagcagctcacaaacggccacggctctgcacactggatcgtcggaaactggagcgagtgctccaccacatgtggcctgggggcctactggagaagggtggagtgcagcacccagatggattctgactgtgcggccatccagagacctgaccctgcaaaaagatgccacctccgtccctgtgctggctggaaagtgggaaactggagcaagtgctccagaaactgcagtgggggcttcaagatacgcgagattcagtgcgtggacagccgggaccaccggaacctgaggccatttcactgccagttcctggccggcattcctcccccattgagcatgagctgtaacccggagccctgtgaggcgtggcaggtggagccttggagccagtgctccaggtcctgtggaggtggagttcaggagagaggagtgttctgtccaggaggcctctgtgattggacaaaaagacccacatccaccatgtcttgcaatgagcacctgtgctgtcactgggccactgggaactgggacctgtgttccacttcctgtggaggtggctttcagaagaggactgtccaatgtgtgccctcagagggcaataaaactgaagaccaagaccaatgtctatgtgatcacaaacccagacctccagaattcaaaaaatgcaaccagcaggcctgcaagaaaagtgccgatttactttgcactaaggacaaactgtcagccagtttctgccagacactgaaagccatgaagaaatgttctgtgcccaccgtgagggctgagtgctgcttctcgtgtccccagacacacatcacacacacccaaaggcaaagaaggcaacggttgctccaaaagtcaaaaggactcctcgaggagttcttttgacttttggagcaaccgggcctggctgaggctgtctcccataagatct

SEQ ID NO: 1016 - protein, 1576 aa, Homo sapiens
RSYGRQPQPGPVRFPDRRQEHFIKGLPEYHVVGPVRVDASGHFLSYGLHYPITSSRRKRDLDGSEDWVYYRISHEEKDLFFNLTVNQGFLSNSYIMEKRYGNLSHVKMMASSAPLCHLSGTVLQQGTRVGTAALSACHGLTGFFQLPHGDFFIEPVKKHPLVEGGYHPHIVYRRQKVPETKEPTCGLKDSVNISQKQELWREKWERHNLPSRSLSRRSISKERWVETLVVADTKMIEYHGSENVESYILTIMNMVTGLFHNPSIGNAIHIVVVRLILLEEEEQGLKIVHHAEKTLSSFCKWQKSINPKSDLNPVHHDVAVLLTRKDICAGFNRPCETLGLSHLSGMCQPHRSCNINEDSGLPLAFTIAHELGHSFGIQHDGKENDCEPVGRHPYIMSRQLQYDPTPLTWSKCSEEYITRFLDRGWGFCLDDIPKKKGLKSKVIAPGVIYDVHHQCQLQYGPNATFCQEVENVCQTLWCSVKGFCRSKLDAAADGTQCGEKKWCMAGKCITVGKKPESIPGGWGRWSPWSHCSRTCGAGVQSAERLCNNPEPKFGGKYCTGERKRYRLCNVHPCRSEAPTFRQMQCSEFDTVPYKNELYHWFPIFNPAHPCELYCRPIDGQFSEKMLDAVIDGTPCFEGGNSRNVCINGICKMVGCDYEIDSNATEDRCGVCLGDGSSCQTVRKMFKQKEGSGYVDIGLIPKGARDIRVMEIEGAGNFLAIRSEDPEKYYLNGGFIIQWNGNYKLAGTVFQYDRKGDLEKLMATGPTNESVWIQLLFQVTNPGIKYEYTIQKDGLDNDVEQQMYFWQYGHWTECSVTCGTGIRRQTAHCIKKGRGMVKATFCDPETQPNGRQKKCHEKACPPRWWAGEWEACSATCGPHGEKKRTVLCIQTMVSDEQALPPTDCQHLLKPKTLLSCNRDILCPSDWTVGNWSECSVSCGGGVRIRSVTCAKNHDEPCDVTRKPNSRALCGLQQCPSSRRVLKPNKGTISNGKNPPTLKPVPPPTSRPRMLTTPTGPESMSTSTPAISSPSPTTASKEGDLGGKQWQDSSTQPELSSRYLISTGSTSQPILTSQSLSIQPSEENVSSSDTGPTSEGGLVATTTSGSGLSSSRNPITWPVTPFYNTLTKGPEMEIHSGSGEEREQPEDKDESNPVIWTKIRVPGNDAPVESTEMPLAPPLTPDLSRESWWPPFSTVMEGLLPSQRPTTSETGTPRVEGMVTEKPANTLLPLGGDHQPEPSGKTANRNHLKLPNNMNQTKSSEPVLTEEDATSLITEGFLLNASNYKQLTNGHGSAHWIVGNWSECSTTCGLGAYWRRVECSTQMDSDCAAIQRPDPAKRCHLRPCAGWKVGNWSKCSRNCSGGFKIREIQCVDSRDHRNLRPFHCQFLAGIPPPLSMSCNPEPCEAWQVEPWSQCSRSCGGGVQERGVFCPGGLCDWTKRPTSTMSCNEHLCCHWATGNWDLCSTSCGGGFQKRTVQCVPSEGNKTEDQDQCLCDHKPRPPEFKKCNQQACKKSADLLCTKDKLSASFCQTLKAMKKCSVPTVRAECCFSCPQTHITHTQRQRRQRLLQKSKGLLEEFF

SEQ ID NO: 1017 - DNA, 3174 bp, Homo sapiens
  CDS (1)..(3174)
ctggaatgcgcccttagatctggccgctggtcaccctggtcccactgttccaggacctgtggggctggagtccagagcgcagagaggctctgcaacaaccccgagccaaagtttggagggaaatattgcactggagaaagaaaacgctatcgcttgtgcaacgtccacccctgtcgctcagaggcaccaacatttcggcagatgcagtgcagtgaatttgacactgttccctacaagaatgaactctaccactggtttcccatttttaacccagcacatccttgtgagctctactgccgacccatagatggccagttttctgagaaaatgctggatgctgtcattgatggtaccccttgctttgaaggcggcaacagcagaaatgtctgtattaatggcatatgtaagatggttggctgtgactatgagatcgattccaatgccaccgaggatcgctgcggtgtgtgcctgggagatggctcttcctgccagactgcgagaaagatgtttaagcagaaggaaggatctggttatgttgacattgggctcattccaaaaggagcaagggacataagagtgatggaaattgagggagctggaaacttcctggccatcaggagtgaagatcctgaaaaatattacctgaatggagggtttattatccagtggaacgggaactataagctggcagggactgtctttcagtatgacaggaaaggagacctggaaaagctgatggccacaggtcccaccaatgagtctgtgtggatccagcttctattccaggtgactaaccctggcatcaagtatgagtacacaatccagaaagatggccttgacaatgatgttgagcagcagatgtacttctggcagtacggccactggacagagtgcagtgtgacctgcgggacaggtatccgccgccaaactgcccattgcataaagaagggccgcgggatggtgaaagctacattctgtgacccagaaacacagcccaatgggagacagaagaagtgccatgaaaaggcttgtccacccaggtggtgggcaggggagtgggaagcatgctcggcgacatgcgggccccacggggagaagaagcgaaccgtgctgtgcatccagaccatggtctctgacgagcaggctctcccgcccacagactgccagcacctgctgaagcccaagaccctcctttcctgcaacagagacatcctgtgcccctcggactggacagtgggcaactggagtgagtgttctgtttcctgtggtggtggagtgcggattcgcagtgtcacatgtgccaagaaccatgatgaaccttgcgatgtgacaaggaaacccaacagccgagctctgtgtggcctccagcaatgcccttctagccggagagttctgaaaccaaacaaaggcactatttccaatggaaaaaacccaccaacactaaagcccgtccctccacctacatccaggcccagaatgctgaccacacccacagggcctgagtctatgagcacaagcactccggcaatcagcagccctagtcctaccacagcctccaaagaaggagacctgggtgggaaacagtggcaagatagctcaacccaacctgagctgagctctcgctatctcatttccactggaagcacttcccagcccatcctcacttcccaatccttgagcattcagccaagtgaggaaaatgtttccagttcagatactggtcctacctcggagggaggccttgtagctacaacaacaagtggttctggcttgtcatcttcccgcaaccctatcacttggcctgtgactccattttacaataccttgaccaaaggtccagaaatggagattcacagtggctcaggggaagaaagagaacagcctgaggacaaagatgaaagcaatcctgtaatatggaccaagatcagagtacctggaaatgacgctccagtggaaagtacagaaatgccacttgcacctccactaacaccagatctcagcagggagtcctggtggccacccttcagcacagtaatggaaggactgctccccagccaaaggcccactacttccgaaactgggacacccagagttgaggggatggttactgaaaagccagccaacactctgctccctctgggaggagaccaccagccagaaccctcaggaaagacggcaaaccgtaaccacctgaaacttccaaacaacatgaaccaaacaaaaagttctgaaccagtcctgactgaggaggatgcaacaagtctgattactgagggctttttgctaaatgcctccaattacaagcagctcacaaacggctacggctctgcacactggatcgtcggaaactggagcgagtgctccaccacatgtggcctgggggcctactggagaagggtggagtgcagcacccagatggattctgactgtgcggccatccagagacctgaccctgcaaaaagatgccacctccgtccctgtgctggctggaaagtgggaaactggagcaagtgctccagaaactgcagtgggggcttcaagatacgcgagattcagtgcgtggacagccgggaccaccggaacctgaggccatttcactgccagttcctggccggcattcctcccccattgagcatgagctgtaacccggagccctgtgaggcgtggcaggtggagccttggagccagtgctccaggtcctgtggaggtggagttcaggagagaggagtgttctgtccaggaggcctctgtgattggacaaaaagacccacatccaccatgtcttgcaatgagcacctgtgctgtcactgggccactgggaactgggacctgtgttccacttcctgtggaggcggctttcagaagaggactgtccaatgtgtgccctcagagggcaataaaactgaagaccaagaccaatgtctatgtgatcacaaacccagacctccagaattcaaaaaatgcaaccagcaggcctgcaagaaaagtgccgatttactttgcactaaggacaaactgtcagccagtttctgccagacactgaaagccatgaagaaatgttctgtgcccaccgtgagggctgagtgctgcttctcgtgtccccagacacacatcacacacacccaaaggcaaagaaggcaacggttgctccaaaagtcaaaagaactcctcgag

SEQ ID NO: 1018 - protein, 1058 aa, Homo sapiens
LECALRSGRWSPWSHCSRTCGAGVQSAERLCNNPEPKFGGKYCTGERKRYRLCNVHPCRSEAPTFRQMQCSEFDTVPYKNELYHWFPIFNPAHPCELYCRPIDGQFSEKMLDAVIDGTPCFEGGNSRNVCINGICKMVGCDYEIDSNATEDRCGVCLGDGSSCQTARKMFKQKEGSGYVDIGLIPKGARDIRVMEIEGAGNFLAIRSEDPEKYYLNGGFIIQWNGNYKLAGTVFQYDRKGDLEKLMATGPTNESVWIQLLFQVTNPGIKYEYTIQKDGLDNDVEQQMYFWQYGHWTECSVTCGTGIRRQTAHCIKKGRGMVKATFCDPETQPNGRQKKCHEKACPPRWWAGEWEACSATCGPHGEKKRTVLCIQTMVSDEQALPPTDCQHLLKPKTLLSCNRDILCPSDWTVGNWSECSVSCGGGVRIRSVTCAKNHDEPCDVTRKPNSRALCGLQQCPSSRRVLKPNKGTISNGKNPPTLKPVPPPTSRPRMLTTPTGPESMSTSTPAISSPSPTTASKEGDLGGKQWQDSSTQPELSSRYLISTGSTSQPILTSQSLSIQPSEENVSSSDTGPTSEGGLVATTTSGSGLSSSRNPITWPVTPFYNTLTKGPEMEIHSGSGEEREQPEDKDESNPVIWTKIRVPGNDAPVESTEMPLAPPLTPDLSRESWWPPFSTVMEGLLPSQRPTTSETGTPRVEGMVTEKPANTLLPLGGDHQPEPSGKTANRNHLKLPNNMNQTKSSEPVLTEEDATSLITEGFLLNASNYKQLTNGYGSAHWIVGNWSECSTTCGLGAYWRRVECSTQMDSDCAAIQRPDPAKRCHLRPCAGWKVGNWSKCSRNCSGGFKIREIQCVDSRDHRNLRPFHCQFLAGIPPPLSMSCNPEPCEAWQVEPWSQCSRSCGGGVQERGVFCPGGLCDWTKRPTSTMSCNEHLCCHWATGNWDLCSTSCGGGFQKRTVQCVPSEGNKTEDQDQCLCDHKPRPPEFKKCNQQACKKSADLLCTKDKLSASFCQTLKAMKKCSVPTVRAECCFSCPQTHITHTQRQRRQRLLQKSKELLE

SEQ ID NO: 1019 - DNA, 1068 bp, Homo sapiens; identical to SEQ ID NO: 1007
  CDS (7)..(1062)

SEQ ID NO: 1020 - protein, 352 aa, Homo sapiens
NLTVNQGFLSNSYIMEKRYGNLSHVKMMASSAPLCHLSGTVLQQGTRVGMAALSACHGLTGFFQLPHGDFFIEPVKKHPLVEGGYHPHIVYRRQKVPETKEPTCGLKDSVNISQKQELWREKWERHNLPSRSLSRRSISKERWVETLVVADTKMIEYHGSENVESCILTIMNMVTGLFHNPSIGNAIHIVVVRLILLEEEEQGLKIVHHAEKTLSSFCKWQKSINPKSDLNPVHHDVAVLLTRKDICAGFNRPCETLGLSHLSGMCQPHRSCNINEDSGLPLAFTIAHELGHSFGIQHDGKENDCEPVGRHPYIMSRQLQYDPTPLTWSKCSEEYITRFLDRGWGFCLDDIP

SEQ ID NO: 1021 - DNA, 1068 bp, Homo sapiens; identical to SEQ ID NO: 1009
  CDS (7)..(1062)

SEQ ID NO: 1022 - protein, 352 aa, Homo sapiens
NLTVNQGFLSNSYIMEKRYGNLSHVKMMASSAPLCHLSGTVLQQGTRVGTAALSACHGLTGFFQLPHGDFFIEPVKKHPLVEGGYHPHIVYRRQKVPETKEPTCGLKDSVNISQKQELWREKWERHNLPSRSLSRRSISKERWVETLVVADTKMIEYHGSENVESYILTIMNMITGLFHNPSIGNAIHIVVVRLILLEEEEQGLKIVHHAEKTLSSFCKWQKSINPKSDLNPVHHDVAVLLTRKDICAGFNRPCETLGLSHLSGMCQPHRSCNINEDSGLPLAFTIAHELGHSFGIQHDGKENDCEPVGRHPYIMSRQLQYDPTPLTWSKCSEEYITRFLDRGWGFCLDDIP

SEQ ID NO: 1023 - DNA, 252 bp, Homo sapiens
  CDS (7)..(246)
aagcttcaccagtgccagctacaatatggacccaatgctaccttctgccaggaagtagaaaacgtctgccagacactgtggtgctccgtgaagggcttttgtcgctctaagctggacgctgctgcagatggaactcaatgtggtgagaagaagtggtgtatggcaggcaagtgcatcacagtggggaagaaaccagagagcattcctggaggctgcggccgctggtcaccctggtcccactgttccctcgag

SEQ ID NO: 1024 - protein, 80 aa, Homo sapiens
HQCQLQYGPNATFCQEVENVCQTLWCSVKGFCRSKLDAAADGTQCGEKKWCMAGKCITVGKKPESIPGGCGRWSPWSHCS

SEQ ID NO: 1025 - DNA, 4777 bp, Homo sapiens; identical to SEQ ID NO: 1015
  CDS (7)..(4728)

SEQ ID NO: 1026 - protein, 1574 aa, Homo sapiens
YGRQPQPGPVRFPDRRQEHFIKGLPEYHVVGPVRVDASGHFLSYGLHYPITSSRRKRDLDGSEDWVYYRISHEEKDLFFNLTVNQGFLSNSYIMEKRYGNLSHVKMMASSAPLCHLSGTVLQQGTRVGTAALSACHGLTGFFQLPHGDFFIEPVKKHPLVEGGYHPHIVYRRQKVPETKEPTCGLKDSVNISQKQELWREKWERHNLPSRSLSRRSISKERWVETLVVADTKMIEYHGSENVESYILTIMNMVTGLFHNPSIGNAIHIVVVRLILLEEEEQGLKIVHHAEKTLSSFCKWQKSINPKSDLNPVHHDVAVLLTRKDICAGFNRPCETLGLSHLSGMCQPHRSCNINEDSGLPLAFTIAHELGHSFGIQHDGKENDCEPVGRHPYIMSRQLQYDPTPLTWSKCSEEYITRFLDRGWGFCLDDIPKKKGLKSKVIAPGVIYDVHHQCQLQYGPNATFCQEVENVCQTLWCSVKGFCRSKLDAAADGTQCGEKKWCMAGKCITVGKKPESIPGGWGRWSPWSHCSRTCGAGVQSAERLCNNPEPKFGGKYCTGERKRYRLCNVHPCRSEAPTFRQMQCSEFDTVPYKNELYHWFPIFNPAHPCELYCRPIDGQFSEKMLDAVIDGTPCFEGGNSRNVCINGICKMVGCDYEIDSNATEDRCGVCLGDGSSCQTVRKMFKQKEGSGYVDIGLIPKGARDIRVMEIEGAGNFLAIRSEDPEKYYLNGGFIIQWNGNYKLAGTVFQYDRKGDLEKLMATGPTNESVWIQLLFQVTNPGIKYEYTIQKDGLDNDVEQQMYFWQYGHWTECSVTCGTGIRRQTAHCIKKGRGMVKATFCDPETQPNGRQKKCHEKACPPRWWAGEWEACSATCGPHGEKKRTVLCIQTMVSDEQALPPTDCQHLLKPKTLLSCNRDILCPSDWTVGNWSECSVSCGGGVRIRSVTCAKNHDEPCDVTRKPNSRALCGLQQCPSSRRVLKPNKGTISNGKNPPTLKPVPPPTSRPRMLTTPTGPESMSTSTPAISSPSPTTASKEGDLGGKQWQDSSTQPELSSRYLISTGSTSQPILTSQSLSIQPSEENVSSSDTGPTSEGGLVATTTSGSGLSSSRNPITWPVTPFYNTLTKGPEMEIHSGSGEEREQPEDKDESNPVIWTKIRVPGNDAPVESTEMPLAPPLTPDLSRESWWPPFSTVMEGLLPSQRPTTSETGTPRVEGMVTEKPANTLLPLGGDHQPEPSGKTANRNHLKLPNNMNQTKSSEPVLTEEDATSLITEGFLLNASNYKQLTNGHGSAHWIVGNWSECSTTCGLGAYWRRVECSTQMDSDCAAIQRPDPAKRCHLRPCAGWKVGNWSKCSRNCSGGFKIREIQCVDSRDHRNLRPFHCQFLAGIPPPLSMSCNPEPCEAWQVEPWSQCSRSCGGGVQERGVFCPGGLCDWTKRPTSTMSCNEHLCCHWATGNWDLCSTSCGGGFQKRTVQCVPSEGNKTEDQDQCLCDHKPRPPEFKKCNQQACKKSADLLCTKDKLSASFCQTLKAMKKCSVPTVRAECCFSCPQTHITHTQRQRRQRLLQKSKGLLEEFF

SEQ ID NO: 1027 - DNA, 1068 bp, Homo sapiens; identical to SEQ ID NO: 1011
  CDS (1)..(1068)

SEQ ID NO: 1028 - protein, 356 aa, Homo sapiens; identical to SEQ ID NO: 1012

SEQ ID NO: 1029 - DNA, 252 bp, Homo sapiens
  CDS (1)..(252)
aagcttcaccagtgccagctacaatatggacccaatgctaccttctgccaggaagtagaaaacgtctgccagacactgtggtgctccgtgaagggcttttgtcgctctaagctggacgctgctgcagatggaactcaatgtggtgagaagaagtggtgtatggcaggcaagtgcatcacagtggggaagaaaccagagagcattcctggaggctggggccgctggtcaccctggtcccactgttccctcgag

SEQ ID NO: 1030 - protein, 84 aa, Homo sapiens
KLHQCQLQYGPNATFCQEVENVCQTLWCSVKGFCRSKLDAAADGTQCGEKKWCMAGKCITVGKKPESIPGGWGRWSPWSHCSLE

SEQ ID NO: 1031 - DNA, 933 bp, Homo sapiens
  CDS (8)..(931)
ggattaaatggaaaacgatcacaatcataatcatacacatggcgcgaacaaaaagactttattaattagttttattattattacaagttacatgattgtagaagggttaggtggtttctttactaacagtcttgcgttaatttcagatgctggtcatatgttaagtgattctatttctttaggtattgctttaattgcatttactttaggagcgaagcaagctaatacaaataaaacttttggctacaaaaggtttgaaatactagcagctgtacttaatggtattactttgatgttaatagctatctatattttttatgaagctattgagagatttaaaaacccccctgaggtagcttctacaggcatgttaattatcgccttggtaggcttgtttattaatattattgtggcttggataatgctgcgcgggagcgatgtagaagaaaacttaaatatgcgtggagcatatttgcatgtaataagcgacatgcttggatctataggtgcagttatagcagcccttctcattatattttttagatgggggtgggcggatcctttagcaagtgtgattgtagcaattttagtactacgtagcggcttttatgtaacaaaatcaagtcttcatgtattaatggagggagcaccaagcaatataaatacaaaagacattattaaaactattaaaaaattcaaagaagttaaaaatattcatgactttcatgtttggtcagtaactagcggattaaacgcgttatcttgtcatattgttgtagaagatacaatgaccattactgaaaatgagtttttacttaaacgtatagaacatgaattcaatcatcaaaatattcaacatgtcacaatacagactgaaacttctaacaataatcatagtgaaaaattgttttgtatcgtgaaagaagaagacag

SEQ ID NO: 1032 - protein, 308 aa, Homo sapiens
MENDHNHNHTHGANKKTLLISFIIITSYMIVEGLGGFFTNSLALISDAGHMLSDSISLGIALIAFTLGAKQANTNKTFGYKRFEILAAVLNGITLMLIAIYIFYEAIERFKNPPEVASTGMLIIALVGLFINIIVAWIMLRGSDVEENLNMRGAYLHVISDMLGSIGAVIAALLIIFFRWGWADPLASVIVAILVLRSGFYVTKSSLHVLMEGAPSNINTKDIIKTIKKFKEVKNIHDFHVWSVTSGLNALSCHIVVEDTMTITENEFLLKRIEHEFNHQNIQHVTIQTETSNNNHSEKLFCIVKEED

SEQ ID NO: 1033 - DNA, 1375 bp, Homo sapiens
  CDS (96)..(1361)
gggacgccggacgccgtccggacattcggcgcgcttgccacgatcttggacgggtctcgggcctcgacctttgaattccccgctccggctccaagatgtcagcaacgctgatcctggagcccccaggccgctgctgctggaacgagccggtgcgcattgccgtgcgcggcctggccccggagcagcgggttacgctgcgcgcgtccctgcgcgacgagaagggcgcgctcttccgggcccacgcgcgctactgcgccgacgcccgcggcgagctggacctggagcgcgcacccgcgctgggcggcagcttcgcgggactcgagcccatggggctgctctgggccctggaacccgagaagcctttttggcgcttcctgaagcgggacgtacagattccttttgtcgtggagttggaggtgctggacggccacgaccccgagcctggacggctgctgtgccaggcgcagcacgagcgccacttcctcccgccaggggtgcggcgccagtcggtgcgagcgggccgggtgcgcgccacgctcttcctgccgccaggtgagcctggacccttcccagggatcattgacatctttggtattggagggggcctcttggaatatcgagccagcctccttgctggccatggctttgccacgttggctctagcttattataactttgaagatctccccaataacatggacaacatatccctggagtacttcgaagaagccgtatgctacatgcttcaacatccccaggttaaaggcccaggcattgggcttttgggcatttctctaggagctgatatttgtctctcaatggcctcattcttgaagaatgtctcagccacagtttccatcaatggatctgggatcagtgggaacacagccatcaactataagcacagtagcattccaccattgggctatgacctgaggagaatcaaggtagctttctcaggcctcgtggacattgtggatataaggaatgctctcgtaggagggtacaagaaccccagcatgattccaatagagaaggcccaggggcccatcctgctcattgttggtcaggatgaccataactggagaagtgagttgtatgcccaaacagtctctgaacggttacaggcccatggaaaggaaaaaccccagatcatctgttaccctgggactgggcattacatcgagcctccttacttccccctgtgcccagcttcccttcacagattactgaacaaacatgttatatggggtggggagcccagggctcattctaaggcccaggaagatgcctggaagcaaattctagccttcttctgcaaacacctgggaggtacccagaaaacagctgtccctaaattgtaatgcatttgtct

SEQ ID NO: 1034 - protein, 422 aa, Homo sapiens
MSATLILEPPGRCCWNEPVRIAVRGLAPEQRVTLRASLRDEKGALFRAHARYCADARGELDLERAPALGGSFAGLEPMGLLWALEPEKPFWRFLKRDVQIPFVVELEVLDGHDPEPGRLLCQAQHERHFLPPGVRRQSVRAGRVRATLFLPPGEPGPFPGIIDIFGIGGGLLEYRASLLAGHGFATLALAYYNFEDLPNNMDNISLEYFEEAVCYMLQHPQVKGPGIGLLGISLGADICLSMASFLKNVSATVSINGSGISGNTAINYKHSSIPPLGYDLRRIKVAFSGLVDIVDIRNALVGGYKNPSMIPIEKAQGPILLIVGQDDHNWRSELYAQTVSERLQAHGKEKPQIICYPGTGHYIEPPYFPLCPASLHRLLNKHVIWGGEPRAHSKAQEDAWKQILAFFCKHLGGTQKTAVPKL

SEQ ID NO: 1035 - DNA, 1285 bp, Homo sapiens
  CDS (2)..(1285)
caccggatccaccatgtcagcaacgctgatcctggagcccccaggccgctgctgctggaacgagccggtgcgcattgccgtgcgcggcctggccccggagcagcgggttacgctgcgcgcgtccctgcgcgacgagaagggcgcgctcttccgggcccacgcgcgctactgcgccgacgcctgcggcgagctggacctggagcgcgcacccgcgctgggcggcagcttcgcgggactcgagcccatggggctgctctgggccctggaacccgagaagcctttttggcgcttcctgaagcgggacgtacagattccttttgtcgtggagttggaggtgctggacggccacgaccccgagcctggacggctgctgtgccaggcgcagcacgagcgccacttcctcccgccaggggtgcggcgccagtcggtgcgagcgggccgggtgcgcgccacgctcttcctgccgccaggacctggacccttcccagggatcattgacatctttggtattggagggggcctcttggaatatcgagccagcctccttgctggccatggctttgccacgttggctctagcttattataactttgaagatctccccaataacatggacaacatatccctggagtacttcgaagaagccgtatgctacatgcttcaacatccccaggtaaaaggcccaggcattgggcttttgggcatttctctaggagctgatatttgtctctcaatggcctcattcttgaagaatgtctcagccacagtttccatcaatggatctgggatcagtgggaacacagccatcaactataagcacagtagcattccaccattgggctatgacctgaggagaatcaaggtagctttctcaggcctcgtggacatcgtggatataaggaatgctctcgtaggagggtacaagaaccccagcatgattccaatagagaaggcccaggggcccatcctgctcattgttggtcaggatgaccataactggagaagtgagttgtatgcccaaacagtctctgaacggttacaggcccatggaaaggaaaaaccccagatcatctgttaccctgggactgggcattacatcgagcctccttacttccccctgtgcccagcttcccttcacagattactgaacaaacatgttatatggggtggggagcccagggctcattctaaggcccaggaagatgcctggaagcaaattctagccttcttctgcaaacacctgggaggtacccagaaaacagctgtccctaaattggtcgacggc

SEQ ID NO: 1036 - protein, 428 aa, Homo sapiens
TGSTMSATLILEPPGRCCWNEPVRIAVRGLAPEQRVTLRASLRDEKGALFRAHARYCADACGELDLERAPALGGSFAGLEPMGLLWALEPEKPFWRFLKRDVQIPFVVELEVLDGHDPEPGRLLCQAQHERHFLPPGVRRQSVRAGRVRATLFLPPGPGPFPGIIDIFGIGGGLLEYRASLLAGHGFATLALAYYNFEDLPNNMDNISLEYFEEAVCYMLQHPQVKGPGIGLLGISLGADICLSMASFLKNVSATVSINGSGISGNTAINYKHSSIPPLGYDLRRIKVAFSGLVDIVDIRNALVGGYKNPSMIPIEKAQGPILLIVGQDDHNWRSELYAQTVSERLQAHGKEKPQIICYPGTGHYIEPPYFPLCPASLHRLLNKHVIWGGEPRAHSKAQEDAWKQILAFFCKHLGGTQKTAVPKLVDG

SEQ ID NO: 1037 - DNA, 660 bp, Homo sapiens; identical to SEQ ID NO: 389
  CDS (1)..(660)

SEQ ID NO: 1038 - protein, 220 aa, Homo sapiens; identical to SEQ ID NO: 390

SEQ ID NO: 1039 - DNA, 672 bp, Homo sapiens
agatcttcactgggggctgcgacgtctcggccaggaggcacccctggcagggaggagttggaggcttgcgcgtttagagtgcaggtggggcagctgaggctctatgaggacgaccagcggacgaaggtggttgagatcgtccgtcacccccagtacaacgagagcctgtctgcccagggcggtgcggacatcgccctgctgaagctggaggccccggtgccgctgtctgagctcatccacccggtctcgctcccgtctgcctccctggacgtgccctcggggaagacctgctgggtgaccggctggggtgtcattggacgtggagaactactgccctggcccctcagcttgtgggaggcgacggtgaaggtcaggagcagcgtcctctgtaaccagacctgtcgccgccgctttccttccaaccacactgagcggtttgagcggctcatcaaggacgacatgctgtgtgccggggacgggaaccacggctcctggccaggcgacaacgggggccccctcctgtgcaggcggaattgcacctgggtccaggtggaggtggtgagctggggcaaactctgcggccttcgcggctatcccggcatgtacacccgcgtgacgagctacgtgtcctggatccgccagtacgtcccgccgttccccagacgcctcgag

SEQ ID NO: 1040 - protein, 224 aa, Homo sapiens
RSSLGAATSRPGGTPGREELEACAFRVQVGQLRLYEDDQRTKVVEIVRHPQYNESLSAQGGADIALLKLEAPVPLSELIHPVSLPSASLDVPSGKTCWVTGWGVIGRGELLPWPLSLWEATVKVRSSVLCNQTCRRRFPSNHTERFERLIKDDMLCAGDGNHGSWPGDNGGPLLCRRNCTWVQVEVVSWGKLCGLRGYPGMYTRVTSYVSWIRQYVPPFPRRLE

SEQ ID NO: 1041 - DNA, 672 bp, Homo sapiens; identical to SEQ ID NO: 395
  CDS (1)..(672)

SEQ ID NO: 1042 - protein, 224 aa, Homo sapiens
RSSLGAATSRPGGTPGREELEACAFRVQVGQLRLYEDDQRTKVVEIVRHPQYNESLSAQGGADIALLKLEAPVPLSELIHPVSLPSASLDVPSGKTCWVTGWGVIGRGELLPWPLSLWEATVKVRSNVLCNQTCRRRFPSNHTERFERLIKDDMLCAGDGNHGSWPGDNGGPLLCRRNCTWVQVEVVSWGKLCGLRGYPGMYTRVTSYVSWIRQYVPPFPRRLE

SEQ ID NO: 1043 - DNA, 672 bp, Homo sapiens
  CDS (1)..(672)
agatcttcactgggggctgcgacgtctcggccaggaggcacccctggcagggaggagttggaggcttgcgcgtttagagtgcaggtggggcagctgaggctctatgaggacgaccagcggacgaaggtggttgagatcgtccgtcacccccagtacaacgagagcctgtctgcccaggccggtgcggacatcgccctgctgaagctggaggccccggtgccgctgtctgagctcatccacccggtctcgctcccgtctgcctccctggacgtgccctcggggaagacctgctgggtgaccggctggggtgtcattggacgtggagaactactgccctggcccctcagcttgtgggaggcgacggtgaaggtcaggagcaacgtcctctgtaaccagacctgtcgccgccgctttccttccaaccacactgagcggtttgagcggctcatcaaggacgacatgctgtgtgccggggacgggaaccacggctcctggccaggcgacaacgggggccccctcctgtgcaggcggaattgcacctgggtccaggtggaggtggtgagctggggcaaactctgcggccttcgcggctatcccggcatgtacacccgcgtgacgagctacgtgtcctggatccgccagtacgtcccgccgttccccagacgcctcgag

SEQ ID NO: 1044 - protein, 224 aa, Homo sapiens
RSSLGAATSRPGGTPGREELEACAFRVQVGQLRLYEDDQRTKVVEIVRHPQYNESLSAQAGADIALLKLEAPVPLSELIHPVSLPSASLDVPSGKTCWVTGWGVIGRGELLPWPLSLWEATVKVRSNVLCNQTCRRRFPSNHTERFERLIKDDMLCAGDGNHGSWPGDNGGPLLCRRNCTWVQVEVVSWGKLCGLRGYPGMYTRVTSYVSWIRQYVPPFPRRLE

SEQ ID NO: 1045 - DNA, 672 bp, Homo sapiens; identical to SEQ ID NO: 395
  CDS (7)..(666)

SEQ ID NO: 1046 - protein, 220 aa, Homo sapiens; identical to SEQ ID NO: 396

SEQ ID NO: 1047 - DNA, 972 bp, Homo sapiens
  CDS (1)..(969)
atggattcgaaatatcagtgtgtgaagctgaatgatggtcacttcatgcctgtcctgggatttggcacctatgcgcctgcagaggttcctaaaagtaaagctttagaggccaccaaattggcaattgaagctggcttccgccatattgattctgctcatttatacaataatgaggagcaggttggactggccatccgaagcaagattgcagatggcagtgtgaagagagaagacatattctacacttcaaagctttggtgcaattcccatcgaccagagttggtccgaccagccttggaaaggtcactgaaaaatcttcaattggattatgttgacctctaccttattcattttccagtgtctgtaaagccaggtgaggaagtgatcccaaaagatgaaaatggaaaaatactatttgacacagtggatctctgtgccacgtgggaggccgtggagaagtgtaaagatgcaggattggccaagtccatcggggtgtccaacttcaaccgcaggcagctggagatgatcctcaacaagccagggctcaagtacaagcctgtctgcaaccaggtggaatgtcatccttacttcaaccagagaaaactgctggatttctgcaagtcaaaagacattgttctggttgcctatagtgctctgggatcccaccgagaagaaccatgggtggacccgaactccccggtgctcttggaggacccagtcctttgtgccttggcaaaaaagcacaagcgaaccccagccctgattgccctgcgctaccagctacagcgtggggttgtggtcctggccaagagctacaatgagcagcgcatcagacagaacgtgcaggtgtttgaattccagttgacttcagaggagatgaaagccatagatggcctaaacagaaatgtgcgatatttgacccttgatatttttgctggcccccctaattatccattttctgatgaatattaa

SEQ ID NO: 1048 - protein, 323 aa, Homo sapiens
MDSKYQCVKLNDGHFMPVLGFGTYAPAEVPKSKALEATKLAIEAGFRHIDSAHLYNNEEQVGLAIRSKIADGSVKREDIFYTSKLWCNSHRPELVRPALERSLKNLQLDYVDLYLIHFPVSVKPGEEVIPKDENGKILFDTVDLCATWEAVEKCKDAGLAKSIGVSNFNRRQLEMILNKPGLKYKPVCNQVECHPYFNQRKLLDFCKSKDIVLVAYSALGSHREEPWVDPNSPVLLEDPVLCALAKKHKRTPALIALRYQLQRGVVVLAKSYNEQRIRQNVQVFEFQLTSEEMKAIDGLNRNVRYLTLDIFAGPPNYPFSDEY

SEQ ID NO: 1049 - DNA, 972 bp, Homo sapiens
  CDS (1)..(969)
atggattcgaaatatcagtgtgtgaagctgaatgatggtcacttcatgcctgtcctgggatttggcacctatgcgcctgcagaggttcctaaaagtaaagctttagaggccaccaaattggcaattgaagctggcttccgccatattgattctgctcatttatacaataatgaggagcaggttggactggccatccgaagcaagattgcagatggcagtgtgaagagagaagacatattctacacttcaaagctttggtgcaattcccatcgaccagagttggtccgaccagccttggaaaggtcactgaaaaatcttcaattggattatgttgacctctaccttattcattttccagtgtctgtaaagccaggtgaggaagtgatcccaaaagatgaaaatggaaaaatactatttgacacagtggatctctgtgccacgtgggaggccgtggagaagtgtaaagatgcaggattggccaagtccatcggggtgtccaacttcaaccgcaggcagctggagatgatcctcaacaagccagggctcaagtacaagcctgtctgcaaccaggtggaatgtcatccttacttcaaccagagaaaactgctggatttctgcaagtcaaaagacattgttctggttgcctatagtgctctgggatcccaccgagaagaaccatgggtggacccgaactccccggtgctcttggaggacccagtcctttgtgccttggcaaaaaagcacaagcgaaccccagccctgattgccctgcgctaccagctacagcgtggggttgtggtcctggccaagagatacaatgagcagcgcatcagacagaacgtgcaggtgtttgaattccagttgacttcagaggagatgaaagccatagatggcctaaacagaaatgtgcgatatttgacccttgatatttttgctggcccccctaattatccattttctgatgaatattaa

SEQ ID NO: 1050 - protein, 323 aa, Homo sapiens
MDSKYQCVKLNDGHFMPVLGFGTYAPAEVPKSKALEATKLAIEAGFRHIDSAHLYNNEEQVGLAIRSKIADGSVKREDIFYTSKLWCNSHRPELVRPALERSLKNLQLDYVDLYLIHFPVSVKPGEEVIPKDENGKILFDTVDLCATWEAVEKCKDAGLAKSIGVSNFNRRQLEMILNKPGLKYKPVCNQVECHPYFNQRKLLDFCKSKDIVLVAYSALGSHREEPWVDPNSPVLLEDPVLCALAKKHKRTPALIALRYQLQRGVVVLAKRYNEQRIRQNVQVFEFQLTSEEMKAIDGLNRNVRYLTLDIFAGPPNYPFSDEY

SEQ ID NO: 1051 - DNA, 1001 bp, Homo sapiens
  CDS (8)..(988)
catctaggccaccatggccatggattcgaaatatcagtgtgtgaagctgaatgatggtcacttcatgcctgtcctgggatttggcacctatgcgcctgcagaggttcctaaaagtaaagctttagaggccaccaaattggcaattgaagctggcttccgccatattgattctgctcatttatacaataatgaggagcaggttggactggccatccgaagcaagattgcagatggcagtgtgaagagagaagacatattctacacttcaaagctttggtgcaattcccatcgaccagagttggtccgaccagccttggaaaggtcactgaaaaatcttcaattggattatgttgacctctaccttattcattttccagtgtctgtaaagccaggtgaggaagtgatcccaaaagatgaaaatggaaaaatactatttgacacagtggatctctgtgccacgtgggaggccgtggagaagtgtaaagatgcaggattggccaagtccatcggggtgtccaacttcaaccgcaggcagctggagatgatcctcaacaagccagggctcaagtacaagcctgtctgcaaccaggtggaatgtcatccttacttcaaccagagaaaactgctggatttctgcaagtcaaaagacattgttctggttgcctatagtgctctgggatcccaccgagaagaaccatgggtggacccgaactccccggtgctcttggaggacccagtcctttgtgccttggcaaaaaagcacaagcgaaccccagccctgattgccctgcgctaccagctacagcgtggggttgtggtcctggccaagagctacaatgagcagcgcatcagacagaacgtgcaggtgtttgaattccagttgacttcagaggagatgaaagccatagatggcctaaacagaaatgtgcgatatttgacccttgatatttttgctggcccccctaattatccattttctgatgaatattaaacgcgtgatc

SEQ ID NO: 1052 - protein, 327 aa, Homo sapiens
ATMAMDSKYQCVKLNDGHFMPVLGFGTYAPAEVPKSKALEATKLAIEAGFRHIDSAHLYNNEEQVGLAIRSKIADGSVKREDIFYTSKLWCNSHRPELVRPALERSLKNLQLDYVDLYLIHFPVSVKPGEEVIPKDENGKILFDTVDLCATWEAVEKCKDAGLAKSIGVSNFNRRQLEMILNKPGLKYKPVCNQVECHPYFNQRKLLDFCKSKDIVLVAYSALGSHREEPWVDPNSPVLLEDPVLCALAKKHKRTPALIALRYQLQRGVVVLAKSYNEQRIRQNVQVFEFQLTSEEMKAIDGLNRNVRYLTLDIFAGPPNYPFSDEY

SEQ ID NO: 1053 - DNA, 983 bp, Homo sapiens
  CDS (30)..(980)
atggattcgatatcagtgtgtgaagctgaatgatggtcacttcgtgcctgtcctgggatttggcacctatgcgcctgcagaggttactcccccaggttcctaaaagtaaagctttagaggccaccaaattggcaattgaagctggcttccgccatattgattctgctcatttatacaataatgaggagcaggttggactggccatccgaagcaagattgcagatggcagtgtgaagagagaagacatattctacacttcaaagctttggtgcaattcccatcgaccagagttggtccgaccagccttggaaaggtcactgaaaaatcttcaattggattatgttgacctctaccttattcattttccagtgtctgtaaagccaggtgaggaagtgatcccaaaagatgaaagtggaaaaatactatttgacacagtggatctctgtgccacgtgggaggccgtggagaagtgtaaagatgcaggattggccaagtccatcggggtgtccaacttcaaccgcaggcagctggagatgatcctcaacaagccagggctcaagtacaagcctgtctgcaaccaggtggaatgtcatccttacttcaaccagagaaaactgctggatttctgcaagtcaaaagacattgttctggttgcctatagtgctctgggatcccaccgagaagaaccatgggtggacccgaactccccggtgctcttggaggacccagtcctttgtgccttggcaaaaaagcacaagcgaaccccagccctggttgccctgcgctaccagctacagcgtggggttgtggtcctggccaagagctacaatgagcagcgcatcagacagaacgtgcaggtgtttgaattccagttgacttcagaggagatgaaagccatagatggcctaaacagaaatgtgcgatatttgacccttgatatttttgctggcccccctaattatccattttctgatgaatattaa

SEQ ID NO: 1054 - protein, 317 aa, Homo sapiens
MMVTSCLSWDLAPMRLQRLLPQVPKSKALEATKLAIEAGFRHIDSAHLYNNEEQVGLAIRSKIADGSVKREDIFYTSKLWCNSHRPELVRPALERSLKNLQLDYVDLYLIHFPVSVKPGEEVIPKDESGKILFDTVDLCATWEAVEKCKDAGLAKSIGVSNFNRRQLEMILNKPGLKYKPVCNQVECHPYFNQRKLLDFCKSKDIVLVAYSALGSHREEPWVDPNSPVLLEDPVLCALAKKHKRTPALVALRYQLQRGVVVLAKSYNEQRIRQNVQVFEFQLTSEEMKAIDGLNRNVRYLTLDIFAGPPNYPFSDEY

SEQ ID NO: 1055 - DNA, 994 bp, Homo sapiens
  CDS (16)..(978)
gccagatctcccaccatggattcgaaatatcagtgtgtgaagctgaatgatggtcacttcatgcctgtcctgggatttggcacctatgcgcctgcagaggttcctaaaagtaaagctttagaggccaccaaattggcaattgaagctggcttccgccatattgattctgctcatttatacaataatgaggagcaggttggactggccatccgaagcaagattgcagatggcagtgtgaagagagaagacatattctacacttcaaagctttggtgcaattcccatcgaccagagttggtccgaccagccttggaaaggtcactgaaaaatcttcaattggattatgttgacctctaccttattcattttccagtgtctgtaaagccaggtgaggaagtgatcccaaaagatgaaaatggaaaaatactatttgacacagtggatctctgtgccacgtgggaggccgtggagaagtgtaaagatgcaggattggccaagtccatcggggtgtccaacttcaaccgcaggcagctggagatgatcctcaacaagccagggctcaagtacaagcctgtctgcaaccaggtggaatgtcatccttacttcaaccagagaaaactgctggatttctgcaagtcaaaagacattgttctggttgcctatagtgctctgggatcccaccgagaagaaccatgggtggacccgaactccccggtgctcttggaggacccagtcctttgtgccttggcaaaaaagcacaagcgaaccccagccctgattgccctgcgctaccagctacagcgtggggttgtggtcctggccaagagctacaatgagcagcgcatcagacagaacgtgcaggtgtttgaattccagttgacttcagaggagatgaaagccatagatggcctaaacagaaatgtgcgatatttgacccttgatatttttgctggcccccctaattatccattttctgatgaatatctcgagggtg

SEQ ID NO: 1056 - protein, 321 aa, Homo sapiens
MDSKYQCVKLNDGHFMPVLGFGTYAPAEVPKSKALEATKLAIEAGFRHIDSAHLYNNEEQVGLAIRSKIADGSVKREDIFYTSKLWCNSHRPELVRPALERSLKNLQLDYVDLYLIHFPVSVKPGEEVIPKDENGKILFDTVDLCATWEAVEKCKDAGLAKSIGVSNFNRRQLEMILNKPGLKYKPVCNQVECHPYFNQRKLLDFCKSKDIVLVAYSALGSHREEPWVDPNSPVLLEDPVLCALAKKHKRTPALIALRYQLQRGVVVLAKSYNEQRIRQNVQVFEFQLTSEEMKAIDGLNRNVRYLTLDIFAGPPNYPFSD

SEQ ID NO: 1057 - DNA, 1219 bp, Homo sapiens
  CDS (24)..(992)
tgctaaccaggccagtgacagaaatggattcgaaataccagtgtgtgaagctgaatgatggtcacttcatgcctgtcctgggatttggcacctatgcgcctgcagaggttcctaaaagtaaagctctagaggccgtcaaattggcaatagaagccgggttccaccatattgattctgcacatgtttacaataatgaggagcaggttggactggccatccgaagcaagattgcagatggcagtgtgaagagagaagacatattctacacttcaaagctttggagcaattcccatcgaccagagttggtccgaccagccttggaaaggtcactgaaaaatcttcaattggactatgttgacctctatcttattcattttccagtgtctgtaaagccaggtgaggaagtgatcccaaaagatgaaaatggaaaaatactatttgacacagtggatctctgtgccacgtgggaggccatggagaagtgtaaagatgcaggattggccaagtccatcggggtgtccaacttcaaccacaggctgctggagatgatcctcaacaagccagggctcaagtacaagcctgtctgcaaccaggtggaatgtcatccttacttcaaccagagaaaactgctggatttctgcaagtcaaaagacattgttctggttgcctatagtgctctgggatcccatcgagaagaaccatgggtggacccgaactccccggtgctcttggaggacccagtcctttgtgccttggcaaaaaagcacaagcgaaccccagccctgattgccctgcgctaccagctgcagcgtggggttgtggtcctggccaagagctacaatgagcagcgcatcagacagaacgtgcaggtgtttgaattccagttgacttcagaggagatgaaagccatagatggcctaaacagaaatgtgcgatatttgacccttgatatttttgctggcccccctaattatccattttctgatgaatattaacatggagggcattgcatgaggtctgccagaaggccctgcgtgtggatggtgacacagaggatggctctatgctggtgactggacacatcgcctctggttaaatctctcctgcttggcgacttcagtaagctacagctaagcccatcggccggaaaagaaagacaataattttgttttttcattttgaaaaaattaaatgctctctcctaaagattcttcaccta

SEQ ID NO: 1058 - protein, 323 aa, Homo sapiens
MDSKYQCVKLNDGHFMPVLGFGTYAPAEVPKSKALEAVKLAIEAGFHHIDSAHVYNNEEQVGLAIRSKIADGSVKREDIFYTSKLWSNSHRPELVRPALERSLKNLQLDYVDLYLIHFPVSVKPGEEVIPKDENGKILFDTVDLCATWEAMEKCKDAGLAKSIGVSNFNHRLLEMILNKPGLKYKPVCNQVECHPYFNQRKLLDFCKSKDIVLVAYSALGSHREEPWVDPNSPVLLEDPVLCALAKKHKRTPALIALRYQLQRGVVVLAKSYNEQRIRQNVQVFEFQLTSEEMKAIDGLNRNVRYLTLDIFAGPPNYPFSDEY

SEQ ID NO: 1059 - DNA, 1001 bp, Homo sapiens; identical to SEQ ID NO: 1051
  CDS (11)..(982)

SEQ ID NO: 1060 - protein, 324 aa, Homo sapiens
TMAMDSKYQCVKLNDGHFMPVLGFGTYAPAEVPKSKALEATKLAIEAGFRHIDSAHLYNNEEQVGLAIRSKIADGSVKREDIFYTSKLWCNSHRPELVRPALERSLKNLQLDYVDLYLIHFPVSVKPGEEVIPKDENGKILFDTVDLCATWEAVEKCKDAGLAKSIGVSNFNRRQLEMILNKPGLKYKPVCNQVECHPYFNQRKLLDFCKSKDIVLVAYSALGSHREEPWVDPNSPVLLEDPVLCALAKKHKRTPALIALRYQLQRGVVVLAKSYNEQRIRQNVQVFEFQLTSEEMKAIDGLNRNVRYLTLDIFAGPPNYPFSD

SEQ ID NO: 1061 - DNA, 1012 bp, Homo sapiens
  CDS (1)..(1011)
gccggtaccaccatgggccaccatcaccaccatcacgattcgaaatatcagtgtgtgaagctgaatgatggtcacttcatgcctgtcctgggatttggcacctatgcgcctgcagaggttcctaaaagtaaagctttagaggccaccaaattggcaattgaagctggcttccgccatattgattctgctcatttatacaataatgaggagcaggttggactggccatccgaagcaagattgcagatggcagtgtgaagagagaagacatattctacacttcaaagctttggtgcaattcccatcgaccagagttggtccgaccagccttggaaaggtcactgaaaaatcttcaattggattatgttgacctctaccttattcattttccagtgtctgtaaagccaggtgaggaagtgatcccaaaagatgaaaatggaaaaatactatttgacacagtggatctctgtgccacgtgggaggccgtggagaagtgtaaagatgcaggattggccaagtccatcggggtgtccaacttcaaccgcaggcagctggagatgatcctcaacaagccagggctcaagtacaagcctgtctgcaaccaggtggaatgtcatccttacttcaaccagagaaaactgctggatttctgcaagtcaaaagacattgttctggttgcctatagtgctctgggatcccaccgagaagaaccatgggtggacccgaactccccggtgctcttggaggacccagtcctttgtgccttggcaaaaaagcacaagcgaaccccagccctgattgccctgcgctaccagctacagcgtggggttgtggtcctggccaagagctacaatgagcagcgcatcagacagaacgtgcaggtgtttgaattccagttgacttcagaggagatgaaagccatagatggcctaaacagaaatgtgcgatatttgacccttgatatttttgctggcccccctaattatccattttctgatgaatatctcgagggtg

SEQ ID NO: 1062 - protein, 337 aa, Homo sapiens
AGTTMGHHHHHHDSKYQCVKLNDGHFMPVLGFGTYAPAEVPKSKALEATKLAIEAGFRHIDSAHLYNNEEQVGLAIRSKIADGSVKREDIFYTSKLWCNSHRPELVRPALERSLKNLQLDYVDLYLIHFPVSVKPGEEVIPKDENGKILFDTVDLCATWEAVEKCKDAGLAKSIGVSNFNRRQLEMILNKPGLKYKPVCNQVECHPYFNQRKLLDFCKSKDIVLVAYSALGSHREEPWVDPNSPVLLEDPVLCALAKKHKRTPALIALRYQLQRGVVVLAKSYNEQRIRQNVQVFEFQLTSEEMKAIDGLNRNVRYLTLDIFAGPPNYPFSDEYLEG

SEQ ID NO: 1063 - DNA, 1225 bp, Homo sapiens
  CDS (24)..(992)
tgctaaccaggccagtgacagaaatggattcgaaataccagtgtgtgaagctgaatgatggtcacttcatgcctgtcctgggatttggcacctatgcgcctgcagaggttcctaaaagtaaagctctagaggccgtcaaattggcaatagaagccgggttccaccatattgattctgcacatgtttacaataatgaggagcaggttggactggccatccgaagcaagattgcagatggcagtgtgaagagagaagacatattctacacttcaaagctttggagcaattcccatcgaccagagttggtccgaccagccttggaaaggtcactgaaaaatcttcaattggactatgttgacctctatcttattcattttccagtgtctgtaaagccaggtgaggaagtgatcccaaaagatgaaaatggaaaaatactatttgacacagtggatctctgtgccacgtgggaggccatggagaagtgtaaagatgcaggattggccaagtccatcggggtgtccaacttcaaccacaggctgctggagatgatcctcaacaagccagggctcaagtacaagcctgtctgcaaccaggtggaatgtcatccttacttcaaccagagaaaactgctggatttctgcaagtcaaaagacattgttctggttgcctatagtgctctgggatcccatcgagaagaaccatgggtggacccgaactccccggtgctcttggaggacccagtcctttgtgccttggcaaaaaagcacaagcgaaccccagccctgattgccctgcgctaccagctgcagcgtggggttgtggtcctggccaagagctacaatgagcagcgcatcagacagaacgtgcaggtgtttgaattccagttgacttcagaggagatgaaagccatagatggcctaaacagaaatgtgcgatatttgacccttgatatttttgctggcccccctaattatccattttctgatgaatattaacatggagggcattgcatgaggtctgccagaaggccctgcgtgtggatggtgacacagaggatggctctatgctggtgactggacacatcgcctctggttaaatctctcctgcttggcgacttcagtaagctacagctaagcccatcggccggaaaagaaagacaataattttgttttttcattttgaaaaaattaaatgctctctcctaaagattcttcacctaaaaaaa

SEQ ID NO: 1064 - protein, 323 aa, Homo sapiens; identical to SEQ ID NO: 1058

SEQ ID NO: 1065 - DNA, 996 bp, Homo sapiens
  CDS (16)..(984)
caccgcggccgcaccatggattcgaaatatcagtgtgtgaagctgaatgatggtcacttcatgcctgtcctgggatttggcacctatgcgcctgcagaggttcctaaaagtaaagctttagaggccaccaaattggcaattgaagctggcttccgccatattgattctgctcatttatacaataatgaggagcaggttggactggccatccgaagcaagattgcagatggcagtgtgaagagagaagacatattctacacttcaaagctttggtgcaattcccatcgaccagagttggtccgaccagccttggaaaggtcactgaaaaatcttcaattggattatgttgacctctaccttattcattttccagtgtctgtaaagccaggtgaggaagtgatcccaaaagatgaaaatggaaaaatactatttgacacagtggatctctgtgccacgtgggaggccgtggagaagtgtaaagatgcaggattggccaagtccatcggggtgtccaacttcaaccgcaggcagctggagatgatcctcaacaagccagggctcaagtacaagcctgtctgcaaccaggtggaatgtcatccttacttcaaccagagaaaactgctggatttctgcaagtcaaaagacattgttctggttgcctatagtgctctgggatcccaccgagaagaaccatgggtggacccgaactccccggtgctcttggaggacccagtcctttgtgccttggcaaaaaagcacaagcgaaccccagccctgattgccctgcgctaccagctacagcgtggggttgtggtcctggccaagagctacaatgagcagcgcatcagacagaacgtgcaggtgtttgaattccagttgacttcagaggagatgaaagccatagatggcctaaacagaaatgtgcgatatttgacccttgatatttttgctggcccccctaattatccattttctgatgaatattaggtcgacggc

SEQ ID NO: 1066 - protein, 323 aa, Homo sapiens; identical to SEQ ID NO: 1048

SEQ ID NO: 1067 - DNA, 4052 bp, Homo sapiens
  CDS (786)..(4022)
cttctgcctcagcctcccgagtagctgggatgggactacagatgcacgccaccacacctggcaattttttttagttttgtggagacaaggtcccatgtgagccactgtgccccaccttttaaagaaattaccataaggaagcaactgtctttagcaaatagaagatcataaacatccttctggagatcttgagatgttgactgcggtttatagggcaatgaaaatctgcctacctgagtgggcaatgagacgggagtgccacctgtgatccttccagggagcaattctttctggtgccaggagcccaaaggaaactcagtcaaccagctacagatgggcttgctccgagtttgttctagaagtcagaactgccagctctgaaaataggtcacaagtgacaggccgtccctgggctgctcacaggaagtagctgcaaaggtcagggaaagtttttaacgactatacaggccagtgaatgacaggctttgaggagcttctcttcttggcatctgaaacagcatactttctgactaccgctgtgtgctgtgaggggctgaggatccagacgtggctgaggaaggtcccggctcatgaggaggtggaagcctgggtgcttaaacagataatccagagtttggatgtgaggtggtgaatcactctggcttcatttggttatactggtcaagagtttggctctggagcaacgtgtctgggtttgaatcctggctgtgcttttggtgatcctccattgttttgaagcacaagacctttaaaccactgtaggtatggacaaggaagaaaggaagatcatcaatcagggtcaagaagatgaaatggagatttatggttacaatttgagtcgctggaagcttgccatagtttctttaggagtgatttgcactggtgggtttctcctcctcctcctctattggatgcctgagtggcgggtgaaagcgacctgtgtcagagctgcaattaaagactgtgacgtagtgctgctgaggactactgatgaattcaaaatgtggttttgtgcaaaaattcgcgttctttctttggaaactcacccaatttcaagtccaaaatctatgtctaataagctttcaaatggccatgcagtttgtttaactgagaatcccactggagaaaataggcacgggatcagtaaatattcacaggctgaatcacaacagattcgttatttcacccatcatagtgtaaaatatttctggaatgataccattcacaattttgatttcttaaagggactggatgaaggtgtttcttgtacgtcaatttatgaaaagcatagtgcaggactgacaaaggggatgcatgcctacagaaaactgctttatggagtaaatgaaattgctgtaaaagtgccttctgtttttaagcttctaattaaagaggttctcaacccattttacattttccagctgttcagtgttatactgtggagcactgatgaatactattactatgctctagctattgtggttatgtccatagtatcaatcgtaagctcactgtattccattagaaagcaatatgttatgttgcatgacatggtggcaactcatagtactgtaagagtttcagtttgtagagtaaatgaagaaatagaagaaatcttttctactgaccttgtgccaggagatgtcatggtcattccattaaatgggacaataatgccttgcgatgctgtacttattaatggtacctgcattgtaaatgaaagcatgttaacaggagaaagtgttccagtgacaaagactaacttgccaaatccttcggtggatgtgaaaggaataggagatgaattatataatccagaaacacataaacgacatactttgttttgtgggacaactgttattcagactcgtttctacaccggagaactcgtcaaagccatagttgttagaacaggatttagtacttccaaaggacagcttgttcgttccatattgtatcccaaaccaactgattttaaactctacagagatgcctacttgtttctactatgtcttgtggcagttgctggcattgggtttatctacactattattaatagcattttaaatgaggtacaagttggggtcataattatcgagtctcttgatattatcacaattactgtgccccctgcacttcctgctgcaatgactgctggtattgtgtatgctcagagaagactgaaaaaaatcggtattttctgtatcagtcctcaaagaataaatatttgtggacagctcaatcttgtttgctttgacaagactggaactctaactgaagatggtttaaatctttgggggattcaacgagtggaaaatgcacggtttctttcaccagaagaaaatgtgtgcaatgagatgttggtaaaatcccagtttgttgcttgtatggctacttgtcattcacttacaaaaattgaaggagtgctctctggtgatccacttgatctgaaaatgtttgaggctattggatggattctggaagaagcaactgaagaagaaacagcacttcataatcgaattatgcccacagtggttcgtcctcccaaacaactgcttcctgaatctacccctgcaggaaaccaagaaatggctacttatgagataggaattgttcgccagttcccattttcttctgctttgcaacgtatgagtgtggttgccagggtgctgggggataggaaaatggacgcctacatgaaaggagcgcccgaggccattgccggtctctgtaaacctgaaacagttcctgtcgattttcaaaacgttttggaagacttcactaaacagggcttccgtgtgattgctcttgcacacagaaaattggagtcaaaactgacatggcataaagtacagaatattagcagggatgcaattgagaacaacatggattttatgggattaattataatgcagaacaaattaaagcaagaaacccctgcagtacttgaagatttgcataaagccaacattcgcaccgtcatggtcacaggtgacagtatgttgactgctgtctctgtggccagagattgtggaatgattctacctcaggataaagtgattattgctgaagcattacctccaaaggatgggaaagttgccaaaataaattggcattatgcagactccctcacgcagtgcagtcatccatcagcaattgacccagaggctattccggttaaattggtccatgatagcttagaggatcttcaaatgactcgttatcattttgcaatgaatggaaaatcattctcagtgatactggagcattttcaagaccttgttcctaagttgatgttgcatggcaccgtgtttgcccgtatggcacctgatcagaagacacagttgatagaagcattgcaaaatgttgagtattttgttgggatgtgtggtgatggcgcaaatgattgtggtgctttgaagagggcacacggaggcatttccttatcggagctcgaagcttcagtggcatctccctttacctctaagactcctagtatttcctgtgtgccaaaccttatcagggaaggccgtgctgctttaataacttccttctgtgtgtttaaattcatggcattgtacagcattatccagtacttcagtgttactctgctgtattctatcttaagtaacctaggagacttccagtttctcttcattgatctggcaatcattttggtagtggtatttacagtgagtttaaatcctgcctggaaagaacttgtggcacaaagaccaccttcgggtcttatatctggggcccttctcttctccgttttgtctcagattatcatctgcattggatttcaatctttgggttttttttgggtcaaacagcaaccttggtatgaagtgtggcatccaaaatcagaggcttgtaatacaacaggaagcgggttttggaattcttcacacgtagacaatgaaaccgaacttgatgaaataatatacaaaattatgaaaataccacagtgttttttatttccagttttcagtacctcatagtggcaattgccttttcaaaaggaaaac

SEQ ID NO: 1068 - protein, 1079 aa, Homo sapiens
MDKEERKIINQGQEDEMEIYGYNLSRWKLAIVSLGVICTGGFLLLLLYWMPEWRVKATCVRAAIKDCDVVLLRTTDEFKMWFCAKIRVLSLETHPISSPKSMSNKLSNGHAVCLTENPTGENRHGISKYSQAESQQIRYFTHHSVKYFWNDTIHNFDFLKGLDEGVSCTSIYEKHSAGLTKGMHAYRKLLYGVNEIAVKVPSVFKLLIKEVLNPFYIFQLFSVILWSTDEYYYYALAIVVMSIVSIVSSLYSIRKQYVMLHDMVATHSTVRVSVCRVNEEIEEIFSTDLVPGDVMVIPLNGTIMPCDAVLINGTCIVNESMLTGESVPVTKTNLPNPSVDVKGIGDELYNPETHKRHTLFCGTTVIQTRFYTGELVKAIVVRTGFSTSKGQLVRSILYPKPTDFKLYRDAYLFLLCLVAVAGIGFIYTIINSILNEVQVGVIIIESLDIITITVPPALPAAMTAGIVYAQRRLKKIGIFCISPQRINICGQLNLVCFDKTGTLTEDGLNLWGIQRVENARFLSPEENVCNEMLVKSQFVACMATCHSLTKIEGVLSGDPLDLKMFEAIGWILEEATEEETALHNRIMPTVVRPPKQLLPESTPAGNQEMATYEIGIVRQFPFSSALQRMSVVARVLGDRKMDAYMKGAPEAIAGLCKPETVPVDFQNVLEDFTKQGFRVIALAHRKLESKLTWHKVQNISRDAIENNMDFMGLIIMQNKLKQETPAVLEDLHKANIRTVMVTGDSMLTAVSVARDCGMILPQDKVIIAEALPPKDGKVAKINWHYADSLTQCSHPSAIDPEAIPVKLVHDSLEDLQMTRYHFAMNGKSFSVILEHFQDLVPKLMLHGTVFARMAPDQKTQLIEALQNVEYFVGMCGDGANDCGALKRAHGGISLSELEASVASPFTSKTPSISCVPNLIREGRAALITSFCVFKFMALYSIIQYFSVTLLYSILSNLGDFQFLFIDLAIILVVVFTVSLNPAWKELVAQRPPSGLISGALLFSVLSQIIICIGFQSLGFFWVKQQPWYEVWHPKSEACNTTGSGFWNSSHVDNETELDEIIYKIMKIPQCFLFPVFSTS

SEQ ID NO: 1069 - DNA, 2649 bp, Homo sapiens
  CDS (183)..(2054)
caactgattttaaactctacagagatgcctacttgtttctactatgtcttgtggcagttgctggcattgggtttatctacactattattaatagcattttaaatgaggtacaagttggggtcataattatcgagtctcttgatattatcacaattactgtgccccctgcacttcctgctgcaatgactgctggtattgtgtatgctcagagaagactgaaaaaaatcggtattttctgtatcagtcctcaaagaataaatatttgtggacagctcaatcttgtttgctttgacaagactggaactctaactgaagatggtttagatctttgggggattcaacgagtggaaaatgcacgatttctttcaccagaagaaaatgtgtgcaatgagatgttggtaaaatcccagtttgttgcttgtatggctacttgtcattcacttacaaaaattgaaggagtgctctctggtgatccacttgatctgaaaatgtttgaggctattggatggattctggaagaagcaactgaagaagaaacagcacttcataatcgaattatgcccacagtggttcgtcctcccaaacaactgcttcctgaatctacccctgcaggaaaccaagaaatggagctgtttgaacttccagctacttatgagataggaattgttcgccagttcccattttcttctgctttgcaacgtatgagtgtggttgccagggtgctgggggataggaaaatggacgcctacatgaaaggagcgcccgaggccattgccggtctctgtaaacctgaaacagttcctgtcgattttcaaaacgttttggaagacttcactaaacagggcttccgtgtgattgctcttgcacacagaaaattggagtcaaaactgacatggcataaagtacagaatattagcagagatgcaattgagaacaacatggattttatgggattaattataatgcagaacaaattaaagcaagaaacccctgcagtacttgaagatttgcataaagccaacattcgcaccgtcatggtcacaggtgacagtatgttgactgctgtctctgtggccagagattgtggaatgattctacctcaggataaagtgattattgctgaagcattacctccaaaggatgggaaagttgccaaaataaattggcattatgcagactccctcacgcagtgcagtcatccatcagcaattgacccagaggctattccggttaaattggtccatgatagcttagaggatcttcaaatgactcgttatcattttgcaatgaatggaaaatcattctcagtgatactggagcattttcaagaccttgttcctaagttgatgttgcatggcaccgtgtttgcccgtatggcacctgatcagaagacacagttgatagaagcattgcaaaatgttgattattttgttgggatgtgtggtgatggcgcaaatgattgtggtgctttgaagagggcacacggaggcatttccttatcggagctcgaagcttcagtggcatctccctttacctctaagactcctagtatttcctgtgtgccaaaccttatcagggaaggccgtgctgctttaataacttccttctgtgtgtttaaattcatggcattgtacagcattatccagtacttcagtgttactctgctgtattctatcttaagtaacctaggagacttccagtttctcttcattgatctggcaatcattttggtagtggtatttacaatgagtttaaatcctgcctggaaagaacttgtggcacaaagaccaccttcgggtcttatatctggggcccttctcttctccgttttgtctcagattatcatctgcattggatttcaatctttgggttttttttgggtcaaacagcaaccttggtatgaagtgtggcatccaaaatcagatgcttgtaatacaacaggaagcgggttttggaattcttcacacgtagacaatgaaaccgaacttgatgaactaatatacaaaattatgaaaataccacagtgttttttatttccagttttcagtacctcatagtggcaattgccttttcaaaaggaaaacccttcaggcaaccttgctacaaaaattatttttttgttttttctgtgatttttttatatatttttatattattcatcatgttgtatccagttgcctctgttgaccaggttcttcagatagtgtgtgtaccatatcagtggcgtgtaactatgctcatcattgttcttgtcaatgcctttgtgtctatcacagtggaggagtcagtggatcggtggggaaaatgctgcttaccctgggccctgggctgtagaaagaagacaccaaaggcaaagtacatgtatctggcgcaggagctcttggttgatccagaatggccaccaaaacctcagacaaccacagaagctaaagctttagttaaggagaatggatcatgtcaaatcatcaccataacatagcagtgaatcagtctcagtggtattgctgatagcagtattcaggaatatgtgattttaggagtttctgatcctgtgtgtcagaatggcactagttcagtttatgtcccttctgatatagtagcttatttgacagctttgctcttccttaaaataaaaaaaaaaaaaaaaaa

SEQ ID NO: 1070 - protein, 624 aa, Homo sapiens
MTAGIVYAQRRLKKIGIFCISPQRINICGQLNLVCFDKTGTLTEDGLDLWGIQRVENARFLSPEENVCNEMLVKSQFVACMATCHSLTKIEGVLSGDPLDLKMFEAIGWILEEATEEETALHNRIMPTVVRPPKQLLPESTPAGNQEMELFELPATYEIGIVRQFPFSSALQRMSVVARVLGDRKMDAYMKGAPEAIAGLCKPETVPVDFQNVLEDFTKQGFRVIALAHRKLESKLTWHKVQNISRDAIENNMDFMGLIIMQNKLKQETPAVLEDLHKANIRTVMVTGDSMLTAVSVARDCGMILPQDKVIIAEALPPKDGKVAKINWHYADSLTQCSHPSAIDPEAIPVKLVHDSLEDLQMTRYHFAMNGKSFSVILEHFQDLVPKLMLHGTVFARMAPDQKTQLIEALQNVDYFVGMCGDGANDCGALKRAHGGISLSELEASVASPFTSKTPSISCVPNLIREGRAALITSFCVFKFMALYSIIQYFSVTLLYSILSNLGDFQFLFIDLAIILVVVFTMSLNPAWKELVAQRPPSGLISGALLFSVLSQIIICIGFQSLGFFWVKQQPWYEVWHPKSDACNTTGSGFWNSSHVDNETELDELIYKIMKIPQCFLFPVFSTS

SEQ ID NO: 1071 - DNA, 2937 bp, Homo sapiens
  CDS (1)..(2934)
atgcagcccctggactttagttcagggggaagtgaccccaacatcagcctctcagaaaagatccgagatcagcttgttgttggacagctgattccagactgctatgtagaacttgaaaaaatcattttatcggagcgtaaaaatgtgccaattgaatttcccgtaattgaccggaaacgattattacaactagtgagagaaaatcagctgcagttagatgaaaatgagcttcctcacgcagttcactttctaaatgaatcaggagtccttcttcattttcaagacccagcactgcagttaagtgacttgtactttgtggaacccaagtggctttgtaaaatcatggcacaggatgttagcagcatttttggcctttatattcgagacattttgacagtgaaagtggaaggttgtccaaaacaccctaagggcattatttcgcgtagagatgtggaaaaatttctttcaaaaaaaaggaaatttccaaagaactacatgtcacagtattttaagctcctagaaaaattccagattgctttgccaataggagaagaatatttgctggttccaagcagtttgtctgaccacaggcctgtgatagagcttccccattgtgagaactctgaaattatcatccgactatatgaaatgccttattttccaatgggattttggtcaagattaatcaatcgattacttgagatttcaccttacatgctttcagggagaggctgtattcttttgggccaagttgtggaccacattgattctctcatggaagaatggtttcctgggttgctggagattgatatttgtggtgaaggagaaactctgttgaagaaatgggcattatatagttttaatgatggtgaagaacatcaaaaaatcttacttgatgacttgatgaagaaagcagaggaaggagatctcttagtaaatccagatcaaccaaggctcaccattccaatatctcagattgcccctgacttgattttggctgacccgcctagaaatattatgttgaataatgatgagttggaatttgaacaagctccagagtttctcctagactgttttgtgtgtattcacttatatccatcaagtgactacatttcaaggcactatatgagaaccataaatattgtacaaacaggatttgctaaatgtcggtggagagtaacagtccacggggctgatcatggtgatggcagttttggatcagtttaccgagcagcctatgaaggagaagaagtggctgtgaagatttttaataaacatacatcactcaggctgttaagacaagagcttgtggtgctttgccacctccaccaccccagtttgatatctttgctggcagctgggattcgtccccggatgttggtgatggagttagcctccaagggttccttggatcgcctgcttcagcaggacaaagccagcctcactagaaccctacagcacaggattgcactccacgtagctgatggtttgagatacctccactcagccatgattatataccgagacctgaaaccccacaatgtgctgcttttcacactgtatcccaatgctgccatcattgcaaagattgctgactacggcattgctcagtactgctgtagaatggggataaaaacatcagagggcacaccaggttttcgtgcacctgaagttgccagaggaaatgtcatttataaccaacaggctgatgtttattcatttggtttactactctatgacattttgacaactggaggtagaatagtagagggtttgaagtttccaaatgagtttgatgaattagaaatacaaggaaaattacctgatccagttaaagaatatggttgtgccccatggcctatggttgagaaattaattaaacagtgtttgaaagaaaatcctcaagaaaggcctacttctgcccaggtattcgacattttgaattcagctgaattagtctgtctgacgagacgcattttattacctaaaaacgtaattgttgaatgcatggttgctacacatcacaacagcaggaatgcaagcatttggctgggctgtgggcacaccgacagaggacagctctcatttcttgacttaaatactgaaggatacacttctgagagcaaacaaaaaaattttcttttggttggaaccgctgatggcaagttagcaatttttgaagataagactgttaagcttaaaggagctgctcctttgaagatactaaatataggaaatgtcagtactccattgatgtgtttgagtgaatccacaaattcaacggaaagaaatgtaatgtggggaggatgtggcacaaagattttctccttttctaatgatttcaccattcagaaactcattgagacaagaacaagccaactgttttcttatgcagctttcagtgattccaacatcataacagtggtggtagacactgctctctatattgctaagcaaaatagccctgttgtggaagtgtgggataagaaaactgaaaaactctgtggactaatagactgcgtgcactttttaagggaggtaatggtaaaagaaaacaaggaatcaaaacacaaaatgtcttattctgggagagtgaaaaccctctgccttcagaagaacactgctctttggataggaactggaggaggccatattttactcctggatctttcaactcgtcgacttatacgtgtaatttacaacttttgtaattcggtcagagtcatgatgacagcacagctaggcagccttaaaaatgtcatgctggtattgggctacaaccggaaaaatactgaaggtacacaaaagcagaaagagatacaatcttgcttgaccgtttgggacatcaatcttccacatgaagtgcaaaatttagaaaaacacattgaagtgagaaaagaattagctgaaaaaatgagacgaacatctgttgagtaa

SEQ ID NO: 1072 - protein, 978 aa, Homo sapiens
MQPLDFSSGGSDPNISLSEKIRDQLVVGQLIPDCYVELEKIILSERKNVPIEFPVIDRKRLLQLVRENQLQLDENELPHAVHFLNESGVLLHFQDPALQLSDLYFVEPKWLCKIMAQDVSSIFGLYIRDILTVKVEGCPKHPKGIISRRDVEKFLSKKRKFPKNYMSQYFKLLEKFQIALPIGEEYLLVPSSLSDHRPVIELPHCENSEIIIRLYEMPYFPMGFWSRLINRLLEISPYMLSGRGCILLGQVVDHIDSLMEEWFPGLLEIDICGEGETLLKKWALYSFNDGEEHQKILLDDLMKKAEEGDLLVNPDQPRLTIPISQIAPDLILADPPRNIMLNNDELEFEQAPEFLLDCFVCIHLYPSSDYISRHYMRTINIVQTGFAKCRWRVTVHGADHGDGSFGSVYRAAYEGEEVAVKIFNKHTSLRLLRQELVVLCHLHHPSLISLLAAGIRPRMLVMELASKGSLDRLLQQDKASLTRTLQHRIALHVADGLRYLHSAMIIYRDLKPHNVLLFTLYPNAAIIAKIADYGIAQYCCRMGIKTSEGTPGFRAPEVARGNVIYNQQADVYSFGLLLYDILTTGGRIVEGLKFPNEFDELEIQGKLPDPVKEYGCAPWPMVEKLIKQCLKENPQERPTSAQVFDILNSAELVCLTRRILLPKNVIVECMVATHHNSRNASIWLGCGHTDRGQLSFLDLNTEGYTSESKQKNFLLVGTADGKLAIFEDKTVKLKGAAPLKILNIGNVSTPLMCLSESTNSTERNVMWGGCGTKIFSFSNDFTIQKLIETRTSQLFSYAAFSDSNIITVVVDTALYIAKQNSPVVEVWDKKTEKLCGLIDCVHFLREVMVKENKESKHKMSYSGRVKTLCLQKNTALWIGTGGGHILLLDLSTRRLIRVIYNFCNSVRVMMTAQLGSLKNVMLVLGYNRKNTEGTQKQKEIQSCLTVWDINLPHEVQNLEKHIEVRKELAEKMRRTSVE

SEQ ID NO: 1073 - DNA, 2687 bp, Homo sapiens
  CDS (108)..(2657)
acgcagttcactttctaaatgaatcaggagtccttcttcattttcaagacccagcactgcagttaagtgacttgtactttgtggaacccaagtggctttgtaaaatcatggcacagattttgacagtgaaagtggaaggttgtccaaaacaccctaagggcattatttcgcgtagagatgtggaaaaatttctttcaaaaaaaaggaaatttccaaagaactacatgtcacagtattttaagctcctagaaaaattccagattgctttgccaataggagaagaatatttgctggttccaagcagtttgtctgaccacaggcctgtgatagagcttccccattgtgagaactctgaaattatcatccgactatatgaaatgccttattttccaatgggattttggtcaagattaatcaatcgattacttgagatttcaccttacatgctttcagggagagaacgagcacttcgcccaaacagaatgtattggcgacaaggcatttacttaaattggtctcctgaagcttattgtctggtaggatctgaagtcttagacaatcatccagagagtttcttaaaaattacagttccttcttgtagaaaaggctgtattcttttgggccaagttgtggaccacattgattctctcatggaagaatggtttcctgggttgctggagattgatatttgtggtgaaggagaaactctgttgaagaaatgggcattatatagttttaatgatggcgaagaacatcaaaaaatcttacttgatgacttgatgaagaaagcagaggaaggagatctcttagtaaatccagatcaaccaaggctcaccattccaatatctcagattgcccctgacttgattttggctgacctgcctagaaatattatgttgaataatgatgagttggaatttgaacaagctccagagtttctcctaggtgatggcagttttggatcagtttaccgagcagcctatgaaggagaagaagtggctgtgaagatttttaataaacatacatcactcaggctgttaagacaagagcttgtggtgctttgccacctccaccaccccagtttgatatctttgctggcagctgggattcgtccccggatgttggtgatggagttagcctccaagggttccttggatcgcctgcttcagcaggacaaagccagcctcactagaaccctacagcacaggattgcactccacgtagctgatggtttgagatacctccactcagccatgattatataccgagacctgaaaccccacaatgtgctgcttttcacactgtatcccaatgctgccatcattgcaaagattgctgactacggcattgctcagtactgctgtagaatggggataaaaacatcagagggcacaccaggttttcgtgcacctgaagttgccagaggaaatgtcatttataaccaacaggctgatgtttattcatttggtttactactctatgacattttgacaactggaggtagaatagtagagggtttgaagtttccaaatgagtttgatgaattagaaatacaaggaaaattacctgatccagttaaagaatatggttgtgccccatggcctatggttgagaaattaattaaacagtgtttgaaagaaaatcctcaagaaaggcctacttctgcccaggtattcgacattttgaattcagctgaattagtctgtctgacgagacgcattttattacctaaaaacgtaattgttgaatgcatggttgctacacatcacaacagcaggaatgcaagcatttggctgggctgtgggcacaccgacagaggacagctctcatttcttgacttaaatactgaaggatacacttctgaggaagttgctgatagtagaatattgtgcttagccttggtgcatcttcctgttgaaaaggaaagctggattgtgtctgggacacagtctggtactctcctggtcatcaataccgaagatgggaaaaagagacataccctagaaaagatgactgattctgtcacttgtttgtattgcaattccttttccaagcaaagcaaacaaaaaaattttcttttggttggaaccgctgatggcaagttagcaatttttgaagataagactgttaagcttaaaggagctgctcctttgaagatactaaatataggaaatgtcagtactccattgatgtgtttgagtgaatccacaaattcaacggaaagaaatgtaatgtggggaggatgtggcacaaagattttctccttttctaatgatttcaccattcagaaactcattgagacaagaacaagccaactgttttcttatgcagctttcagtgattccaacatcataacagtggtggtagacactgctctctatattgctaagcaaaatagccctgttgtggaagtgtgggataagaaaactgaaaaactctgtggactaatagactgcgtgcactttttaagccttaaaaatgtcatgctggtattgggctacaaccggaaaaatactgaaggtacacaaaagcagaaagagatacaatcttgcttgaccgtttgggacatcaatcttccacatgaagtgcaaaatttagaaaaacacattgaagtgagaaaagaattagctgaaaaaatgagacgaacatctgttgagtaagagagaaataggaattgtctttggata

SEQ ID NO: 1074 - protein, 850 aa, Homo sapiens
MAQILTVKVEGCPKHPKGIISRRDVEKFLSKKRKFPKNYMSQYFKLLEKFQIALPIGEEYLLVPSSLSDHRPVIELPHCENSEIIIRLYEMPYFPMGFWSRLINRLLEISPYMLSGRERALRPNRMYWRQGIYLNWSPEAYCLVGSEVLDNHPESFLKITVPSCRKGCILLGQVVDHIDSLMEEWFPGLLEIDICGEGETLLKKWALYSFNDGEEHQKILLDDLMKKAEEGDLLVNPDQPRLTIPISQIAPDLILADLPRNIMLNNDELEFEQAPEFLLGDGSFGSVYRAAYEGEEVAVKIFNKHTSLRLLRQELVVLCHLHHPSLISLLAAGIRPRMLVMELASKGSLDRLLQQDKASLTRTLQHRIALHVADGLRYLHSAMIIYRDLKPHNVLLFTLYPNAAIIAKIADYGIAQYCCRMGIKTSEGTPGFRAPEVARGNVIYNQQADVYSFGLLLYDILTTGGRIVEGLKFPNEFDELEIQGKLPDPVKEYGCAPWPMVEKLIKQCLKENPQERPTSAQVFDILNSAELVCLTRRILLPKNVIVECMVATHHNSRNASIWLGCGHTDRGQLSFLDLNTEGYTSEEVADSRILCLALVHLPVEKESWIVSGTQSGTLLVINTEDGKKRHTLEKMTDSVTCLYCNSFSKQSKQKNFLLVGTADGKLAIFEDKTVKLKGAAPLKILNIGNVSTPLMCLSESTNSTERNVMWGGCGTKIFSFSNDFTIQKLIETRTSQLFSYAAFSDSNIITVVVDTALYIAKQNSPVVEVWDKKTEKLCGLIDCVHFLSLKNVMLVLGYNRKNTEGTQKQKEIQSCLTVWDINLPHEVQNLEKHIEVRKELAEKMRRTSVE

SEQ ID NO: 1075 - DNA, 3052 bp, Homo sapiens
  CDS (108)..(2852)
acgcagttcactttctaaatgaatcaggagtccttcttcattttcaagacccagcactgcagttaagtgacttgtactttgtggaacccaagtggctttgtaaaatcatggcacagattttgacagtgaaagtggaaggttgtccaaaacaccctaagggcattatttcgcgtagagatgtggaaaaatttctttcaaaaaaaaggaaatttccaaagaactacatgtcacagtattttaagctcctagaaaaattccagattgctttgccaataggagaagaatatttgctggttccaagcagtttgtctgaccacaggcctgtgatagagcttccccattgtgagaactctgaaattatcatccgactatatgaaatgccttattttccaatgggattttggtcaagattaatcaatcgattacttgagatttcaccttacatgctttcagggagagaacgagcacttcgcccaaacagaatgtattggcgacaaggcatttacttaaattggtctcctgaagcttattgtctggtaggatctgaagtcttagacaatcatccagagagtttcttaaaaattacagttccttcttgtagaaaaggctgtattcttttgggccaagttgtggaccacattgattctctcatggaagaatggtttcctgggttgctggagattgatatttgtggtgaaggagaaactctgttgaagaaatgggcattatatagttttaatgatggcgaagaacatcaaaaaatcttacttgatgacttgatgaagaaagcagaggaaggagatctcttagtaaatccagatcaaccaaggctcaccattccaatatctcagattgcccctgacttgattttggctgacctgcctagaaatattatgttgaataatgatgagttggaatttgaacaagctccagagtttctcctaggtgatggcagttttggatcagtttaccgagcagcctatgaaggagaagaagtggctgtgaagatttttaataaacatacatcactcaggctgttaagacaagagcttgtggtgctttgccacctccaccaccccagtttgatatctttgctggcagctgggattcgtccccggatgttggtgatggagttagcctccaagggttccttggatcgcctgcttcagcaggacaaagccagcctcactagaaccctacagcacaggattgcactccacgtagctgatggtttgagatacctccactcagccatgattatataccgagacctgaaaccccacaatgtgctgcttttcacactgtatcccaatgctgccatcattgcaaagattgctgactacggcattgctcagtactgctgtagaatggggataaaaacatcagagggcacaccagggtttcgtgcacctgaagttgccagaggaaatgtcatttataaccaacaggctgatgtttattcatttggtttactactctatgacattttgacaactggaggtagaatagtagagggtttgaagtttccaaatgagtttgatgaattagaaatacaaggaaaattacctgatccagttaaagaatatggttgtgccccatggcctatggttgagaaattaattaaacagtgtttgaaagaaaatcctcaagaaaggcctacttctgcccaggtattctctcaggtctttgacattttgaattcagctgaattagtctgtctgacgagacgcattttattacctaaaaacgtaattgttgaatgcatggttgctacacatcacaacagcaggaatgcaagcatttggctgggctgtgggcacaccgacagaggacagctctcatttcttgacttaaatactgaaggatacacttctgaggaagttgctgatagtagaatattgtgcttagccttggtgcatcttcctgttgaaaaggaaagctggattgtgtctgggacacagtctggtactctcctggtcatcaataccgaagatgggaaaaagagacataccctagaaaagatgactgattctgtcacttgtttgtattgcaattccttttccaagcaaagcaaacaaaaaaattttcttttggttggaaccgctgatggcaagttagcaatttttgaagataagactgttaagcttaaaggagctgctcctttgaagatactaaatataggaaatgtcagtactccattgatgtgtttgagtgaatccacaaattcaacggaaagaaatgtaatgtggggaggatgtggcacaaagattttctccttttctaatgatttcaccattcagaaactcattgagacaagaacaagccaactgttttcttatgcagctttcagtgattccaacatcataacagtggtggtagacactgctctctatattgctaagcaaaatagccctgttgtggaagtgtgggataagaaaactgaaaaactctgtggactaatagactgcgtgcactttttaaggttagtaaaaccaaatagaaaaaaattatctaaccttatgatgtctttggctttacatcctatatgtttaaaatcaaagttaagatgcagttcatccaaaggaagatcccatattttgcttcgtgtaatttacaacttttgtaattcggtcagagtcatgatgacagcacagctaggcggaagccttaaaaatgtcatgctggtattgggctacaaccggaaaaatactgaaggtacacaaaagcagaaagagatacaatcttgcttgaccgtttgggacatcaatcttccacatgaagtgcaaaatttagaaaaacacattgaagtgagaaaagaattagctgaaaaaatgagacgaacatctgttgagtaagagagaaataggaattgtctttggataggaaaattattctctcctcttgtaaatatttattttaaaaatgttcacatggaaagggtactcacattttttgaaatagctcgtgtgtatgaaggaatgttattatttttaatttaaatatatgtaaaaatacttaccagtaaatgtgtattttaaagaactatttaaaa

SEQ ID NO: 1076 - protein, 915 aa, Homo sapiens
MAQILTVKVEGCPKHPKGIISRRDVEKFLSKKRKFPKNYMSQYFKLLEKFQIALPIGEEYLLVPSSLSDHRPVIELPHCENSEIIIRLYEMPYFPMGFWSRLINRLLEISPYMLSGRERALRPNRMYWRQGIYLNWSPEAYCLVGSEVLDNHPESFLKITVPSCRKGCILLGQVVDHIDSLMEEWFPGLLEIDICGEGETLLKKWALYSFNDGEEHQKILLDDLMKKAEEGDLLVNPDQPRLTIPISQIAPDLILADLPRNIMLNNDELEFEQAPEFLLGDGSFGSVYRAAYEGEEVAVKIFNKHTSLRLLRQELVVLCHLHHPSLISLLAAGIRPRMLVMELASKGSLDRLLQQDKASLTRTLQHRIALHVADGLRYLHSAMIIYRDLKPHNVLLFTLYPNAAIIAKIADYGIAQYCCRMGIKTSEGTPGFRAPEVARGNVIYNQQADVYSFGLLLYDILTTGGRIVEGLKFPNEFDELEIQGKLPDPVKEYGCAPWPMVEKLIKQCLKENPQERPTSAQVFSQVFDILNSAELVCLTRRILLPKNVIVECMVATHHNSRNASIWLGCGHTDRGQLSFLDLNTEGYTSEEVADSRILCLALVHLPVEKESWIVSGTQSGTLLVINTEDGKKRHTLEKMTDSVTCLYCNSFSKQSKQKNFLLVGTADGKLAIFEDKTVKLKGAAPLKILNIGNVSTPLMCLSESTNSTERNVMWGGCGTKIFSFSNDFTIQKLIETRTSQLFSYAAFSDSNIITVVVDTALYIAKQNSPVVEVWDKKTEKLCGLIDCVHFLRLVKPNRKKLSNLMMSLALHPICLKSKLRCSSSKGRSHILLRVIYNFCNSVRVMMTAQLGGSLKNVMLVLGYNRKNTEGTQKQKEIQSCLTVWDINLPHEVQNLEKHIEVRKELAEKMRRTSVE

SEQ ID NO: 1077 - DNA, 3040 bp, Homo sapiens
  CDS (108)..(2840)
acgcagttcactttctaaatgaatcaggagtccttcttcattttcaagacccagcactgcagttaagtgacttgtactttgtggaacccaagtggctttgtaaaatcatggcacagattttgacagtgaaagtggaaggttgtccaaaacaccctaagggcattatttcgcgtagagatgtggaaaaatttctttcaaaaaaaaggaaatttccaaagaactacatgtcacagtattttaagctcctagaaaaattccagattgctttgccaataggagaagaatatttgctggttccaagcagtttgtctgaccacaggcctgtgatagagcttccccattgtgagaactctgaaattatcatccgactatatgaaatgccttattttccaatgggattttggtcaagattaatcaatcgattacttgagatttcaccttacatgctttcagggagagaacgagcacttcgcccaaacagaatgtattggcgacaaggcatttacttaaattggtctcctgaagcttattgtctggtaggatctgaagtcttagacaatcatccagagagtttcttaaaaattacagttccttcttgtagaaaaggctgtattcttttgggccaagttgtggaccacattgattctctcatggaagaatggtttcctgggttgctggagattgatatttgtggtgaaggagaaactctgttgaagaaatgggcattatatagttttaatgatggcgaagaacatcaaaaaatcttacttgatgacttgatgaagaaagcagaggaaggagatctcttagtaaatccagatcaaccaaggctcaccattccaatatctcagattgcccctgacttgattttggctgacctgcctagaaatattatgttgaataatgatgagttggaatttgaacaagctccagagtttctcctaggtgatggcagttttggatcagtttaccgagcagcctatgaaggagaagaagtggctgtgaagatttttaataaacatacatcactcaggctgttaagacaagagcttgtggtgctttgccacctccaccaccccagtttgatatctttgctggcagctgggattcgtccccggatgttggtgatggagttagcctccaagggttccttggatcgcctgcttcagcaggacaaagccagcctcactagaaccctacagcacaggattgcactccacgtagctgatggtttgagatacctccactcagccatgattatataccgagacctgaaaccccacaatgtgctgcttttcacactgtatcccaatgctgccatcattgcaaagattgctgactacggcattgctcagtactgctgtagaatggggataaaaacatcagagggcacaccagggtttcgtgcacctgaagttgccagaggaaatgtcatttataaccaacaggctgatgtttattcatttggtttactactctatgacattttgacaactggaggtagaatagtagagggtttgaagtttccaaatgagtttgatgaattagaaatacaaggaaaattacctgatccagttaaagaatatggttgtgccccatggcctatggttgaaaaattaattaaacagtgtttgaaagaaaatcctcaagaaaggcctacttctgcccaggtctttgacattttgaattcagctgaattagtctgtctgacgagacgcattttattacctaaaaacgtaattgttgaatgcatggttgctacacatcacaacagcaggaatgcaagcatttggctgggctgtgggcacaccgacagaggacagctctcatttcttgacttaaatactgaaggatacacttctgaggaagttgctgatagtagaatattgtgcttagccttggtgcatcttcctgttgaaaaggaaagctggattgtgtctgggacacagtctggtactctcctggtcatcaataccgaagatgggaaaaagagacataccctagaaaagatgactgattctgtcacttgtttgtattgcaattccttttccaagcaaagcaaacaaaaaaattttcttttggttggaaccgctgatggcaagttagcaatttttgaagataagactgttaagcttaaaggagctgctcctttgaagatactaaatataggaaatgtcagtactccattgatgtgtttgagtgaatccacaaattcaacggaaagaaatgtaatgtggggaggatgtggcacaaagattttctccttttctaatgatttcaccattcagaaactcattgagacaagaacaagccaactgttttcttatgcagctttcagtgattccaacatcataacagtggtggtagacactgctctctatattgctaagcaaaatagccctgttgtggaagtgtgggataagaaaactgaaaaactctgtggactaatagactgcgtgcactttttaaggttagtaaaaccaaatagaaaaaaattatctaaccttatgatgtctttggctttacatcctatatgtttaaaatcaaagttaagatgcagttcatccaaaggaagatcccatattttgcttcgtgtaatttacaacttttgtaattcggtcagagtcatgatgacagcacagctaggcggaagccttaaaaatgtcatgctggtattgggctacaaccggaaaaatactgaaggtacacaaaagcagaaagagatacaatcttgcttgaccgtttgggacatcaatcttccacatgaagtgcaaaatttagaaaaacacattgaagtgagaaaagaattagctgaaaaaatgagacgaacatctgttgagtaagagagaaataggaattgtctttggataggaaaattattctctcctcttgtaaatatttattttaaaaatgttcacatggaaagggtactcacattttttgaaatagctcgtgtgtatgaaggaatgttattatttttaatttaaatatatgtaaaaatacttaccagtaaatgtgtattttaaagaactatttaaaa

SEQ ID NO: 1078 - protein, 911 aa, Homo sapiens
MAQILTVKVEGCPKHPKGIISRRDVEKFLSKKRKFPKNYMSQYFKLLEKFQIALPIGEEYLLVPSSLSDHRPVIELPHCENSEIIIRLYEMPYFPMGFWSRLINRLLEISPYMLSGRERALRPNRMYWRQGIYLNWSPEAYCLVGSEVLDNHPESFLKITVPSCRKGCILLGQVVDHIDSLMEEWFPGLLEIDICGEGETLLKKWALYSFNDGEEHQKILLDDLMKKAEEGDLLVNPDQPRLTIPISQIAPDLILADLPRNIMLNNDELEFEQAPEFLLGDGSFGSVYRAAYEGEEVAVKIFNKHTSLRLLRQELVVLCHLHHPSLISLLAAGIRPRMLVMELASKGSLDRLLQQDKASLTRTLQHRIALHVADGLRYLHSAMIIYRDLKPHNVLLFTLYPNAAIIAKIADYGIAQYCCRMGIKTSEGTPGFRAPEVARGNVIYNQQADVYSFGLLLYDILTTGGRIVEGLKFPNEFDELEIQGKLPDPVKEYGCAPWPMVEKLIKQCLKENPQERPTSAQVFDILNSAELVCLTRRILLPKNVIVECMVATHHNSRNASIWLGCGHTDRGQLSFLDLNTEGYTSEEVADSRILCLALVHLPVEKESWIVSGTQSGTLLVINTEDGKKRHTLEKMTDSVTCLYCNSFSKQSKQKNFLLVGTADGKLAIFEDKTVKLKGAAPLKILNIGNVSTPLMCLSESTNSTERNVMWGGCGTKIFSFSNDFTIQKLIETRTSQLFSYAAFSDSNIITVVVDTALYIAKQNSPVVEVWDKKTEKLCGLIDCVHFLRLVKPNRKKLSNLMMSLALHPICLKSKLRCSSSKGRSHILLRVIYNFCNSVRVMMTAQLGGSLKNVMLVLGYNRKNTEGTQKQKEIQSCLTVWDINLPHEVQNLEKHIEVRKELAEKMRRTSVE

SEQ ID NO: 1079 - DNA, 2955 bp, Homo sapiens
gagtccttcttcattttcaagacccagcactgcagttaagtgacttgtactttgtggaacccaagtggctttgtaaaatcatggcacagattttgacagtgaaagtggaaggttgtccaaaacaccctaagggaattatttcgcgtagagatgtggaaaaatttctttcaaaaaaaaggaaatttccaaagaactacatgtcacagtattttaagctcctagaaaaattccagattgctttgccaataggagaagaatatttgctggttccaagcagtttgtctgaccacaggcctgtgatagagcttccccattgtgagaactctgaaattatcatccgactatatgaaatgccttattttccaatgggattttggtcaagattaatcaatcgattacttgagatttcaccttacatgctttcagggagagaacgagcacttcgcccaaacagaatgtattggcgacaaggcatttacttaaattggtctcctgaagcttattgtctggtaggatctgaagtcttagacaatcatccagagagtttcttaaaaattacagttccttcttgtagaaaaggctgtattcttttgggccaagttgtggaccacattgattctctcatggaagaatggtttcctgggttgctggagattgatatttgtggtgaaggagaaactctgttgaagaaatgggcattatatagttttaatgatggtgaagaacatcaaaaaatcttacttgatgacttgatgaagaaagcagaggaaggagatctcttagtaaatccagatcaaccaaggctcaccattccaatatctcagattgcccctgacttgattttggctgacctgcctagaaatattatgttgaataatgatgagttggaatttgaacaagctccagagtttctcctaggtgatggcagttttggatcagtttaccgagcagcctatgaaggagaagaagtggctgtgaagatttttaataaacatacatcactcaggctgttaagacaagagcttgtggtgctttgccacctccaccaccccagtttgatatctttgctggcagctgggattcgtccccggatgttggtgatggagttagcctccaagggttccttggatcgcctgcttcagcaggacaaagccagcctcactagaaccctacagcacaggattgcactccacgtagctgatggtttgagatacctccactcagccatgattatataccgagacctgaaaccccacaatgtgcggcttttcacactgtatcccaatgctgccatcattgcaaagattgctgactacggcattgctcagtactgctgtagaatggggataaaaacatcagagggcacaccagggtttcgtgcacctgaagttgccagaggaaatgtcatttataaccaacaggctgatgtttattcatttggtttactactctatgacattttgacaactggaggtagaatagtagagggtttgaagtttccaaatgagtttgatgaattagaaatacaaggaaaattacctgatccagttaaagaatatggttgtgccccatggcctatggttgagaaattaattaaacagtgtttgaaagaaaatcctcaagaaaggcctacttctgcccaggtctttgacattttgaattcagctgaattagtctgtctgacgagacgcattttattacctaaaaacgtaattgttgaatgcatggttgctacacatcacaacagcaggaatgcaagcatttggctgggctgtgggcacaccgacagaggacagctctcatttcttgacttaaatactgaaggatacacttctgaggaagttgctgatagtagaatattgtgcttagccttggtgcatcttcctgttgaaaaggaaagctggattgtgtctgggacacagtctggtactctcctggtcatcaataccgaagatgggaaaaagagacataccctagaaaagatgactgattctgtcacttgtttgtattgcaattccttttccaagcaaagcaaacaaaaaaattttcttttggttggaaccgctgatggcaagttagcaatttttgaagataagactgttaagcttaaaggagctgctcctttgaagatactaaatataggaaatgtcagtactccattgatgtgtttgagtgaatccacaaattcaacggaaagaaatgtaatgtggggaggatgtggcacaaagattttctccttttctaatgatttcaccattcagaaactcattgagacaagaacaagccaactgttttcttatgcagctttcagtgattccaacatcataacagtggtggtagacactgctctctatattgctaagcaaaatagccctgttgtggaagtgtgggataagaaaactgaaaaactctgtgggctaatagactgcgtgcactttttaagggaggtaacggtaaaagaaaacaaggaatcaaaacacaaaatgtcttattctgggagagtgaaaaccctctgccttcagaagaacactgctctttggataggaactggaggaggccatattttactcctggatctttcaactcgtcgacttatacgtgtaatttacaacttttgtaattcggtcagagtcatgatgacagcacagctaggaagccttaaaaatgtcatgctggtattgggctacaaccggaaaaatactgaaggtacacaaaagcagaaagagatacaatcttgcttgaccgtttgggacatcaatcttccacatgaagtgcaaaatttagaaaaacacattgaagtgagaaaagaattagctgaaaaaatgagacgaacatctgttgagtaagagagaaataggaattgtctttggataggaaaattattctctcctcttgtaaatatttattttaaaaatgttcacatggaaagggtactcacatttttaagggcgaatc

SEQ ID NO: 1080 - protein, 921 aa, Homo sapiens
MAQILTVKVEGCPKHPKGIISRRDVEKFLSKKRKFPKNYMSQYFKLLEKFQIALPIGEEYLLVPSSLSDHRPVIELPHCENSEIIIRLYEMPYFPMGFWSRLINRLLEISPYMLSGRERALRPNRMYWRQGIYLNWSPEAYCLVGSEVLDNHPESFLKITVPSCRKGCILLGQVVDHIDSLMEEWFPGLLEIDICGEGETLLKKWALYSFNDGEEHQKILLDDLMKKAEEGDLLVNPDQPRLTIPISQIAPDLILADLPRNIMLNNDELEFEQAPEFLLGDGSFGSVYRAAYEGEEVAVKIFNKHTSLRLLRQELVVLCHLHHPSLISLLAAGIRPRMLVMELASKGSLDRLLQQDKASLTRTLQHRIALHVADGLRYLHSAMIIYRDLKPHNVRLFTLYPNAAIIAKIADYGIAQYCCRMGIKTSEGTPGFRAPEVARGNVIYNQQADVYSFGLLLYDILTTGGRIVEGLKFPNEFDELEIQGKLPDPVKEYGCAPWPMVEKLIKQCLKENPQERPTSAQVFDILNSAELVCLTRRILLPKNVIVECMVATHHNSRNASIWLGCGHTDRGQLSFLDLNTEGYTSEEVADSRILCLALVHLPVEKESWIVSGTQSGTLLVINTEDGKKRHTLEKMTDSVTCLYCNSFSKQSKQKNFLLVGTADGKLAIFEDKTVKLKGAAPLKILNIGNVSTPLMCLSESTNSTERNVMWGGCGTKIFSFSNDFTIQKLIETRTSQLFSYAAFSDSNIITVVVDTALYIAKQNSPVVEVWDKKTEKLCGLIDCVHFLREVTVKENKESKHKMSYSGRVKTLCLQKNTALWIGTGGGHILLLDLSTRRLIRVIYNFCNSVRVMMTAQLGSLKNVMLVLGYNRKNTEGTQKQKEIQSCLTVWDINLPHEVQNLEKHIEVRKELAEKMRRTSVE

SEQ ID NO: 1081 - DNA, 1580 bp, Homo sapiens
  CDS (51)..(1481)
caagacagcaaggcatagagacaacatagagctaagtaaagccagtggaaatgaagagtcttccaatcctactgttgctgtgcgtggcagtttgctcagcctatccattggatggagctgcaaggggtgaggacaccagcatgaaccttgttcagaaatatctagaaaactactacgacctcgaaaaagatgtgaaacagtttgttaggagaaaggacagtggtcctgttgttaaaaaaatccgagaaatgcagaagttccttggattggaggtgacggggaagctggactccgacactctggaggtgatgcgcaagcccatgtgtggagttcctgacgttggtcacttcagaacctttcctggcatcccgaagtggaggaaaacccaccttacatacaggattgtgaattatacaccagatttgccaaaagatgctgttgattctgctgttgagaaagctctgaaagtctgggaagaggtgactccactcacattctccaggctgtatgaaggagagactgatataatgatctcttttgcagttagagaacatggagacttttacccttttgatggacctggaaatgttttggcccatgcctatgcccctgggccagggattaatggagatgcccactttgatgatgatgaacaatggacaaaggatacaacagggaccaatttatttctcgttgctgctcatgaaattggccactccctgggtctctttcactcagccaacactgaagctttgatgtacccactctatcactcactcacagacctgactcggttccgcctgtctcaagatgatataaatggcattcagtccctctatggacctccccctgactcccctgagacccccctggtacccacggaacctgtccctccagaacctgggacgccagccaactgtgatcctgctttgtcctttgatgctgtcagcactctgaggggagaaatcctgatctttaaagacaggcacttttggcgcaaatccctcaggaagcttgaacctgaattgcatttgatctcttcattttggccatctcttccttcaggcgtggatgccgcatatgaagttactagcaaggacctcgttttcatttttaaaggaaatcaattctgggccatcagaggaaatgaggtacgagctggatacccaagaggcatccacaccctaggtttccctccaaccgtgaggaaaatcgatgcagccatttctgataaggaaaagaacaaaacatatttctttgtagaggacaaatactggagatttgatgagaagagaaattccatggagccaggctttcccaagcaaatagctgaagactttccagggattgactcaaagattgatgctgtttttgaagaatttgggttcttttatttctttactggatcttcacagttggagtttgacccaaatgcaaagaaagtgacacacactttgaagagtaacagctggcttaattgttgaaagagatatgtagaaggcacaatatgggcactttaaatgaagctaataattcttcacctaagtctctgtgaattgaaatgttcgttttctcctgct

SEQ ID NO: 1082 - protein, 477 aa, Homo sapiens
MKSLPILLLLCVAVCSAYPLDGAARGEDTSMNLVQKYLENYYDLEKDVKQFVRRKDSGPVVKKIREMQKFLGLEVTGKLDSDTLEVMRKPMCGVPDVGHFRTFPGIPKWRKTHLTYRIVNYTPDLPKDAVDSAVEKALKVWEEVTPLTFSRLYEGETDIMISFAVREHGDFYPFDGPGNVLAHAYAPGPGINGDAHFDDDEQWTKDTTGTNLFLVAAHEIGHSLGLFHSANTEALMYPLYHSLTDLTRFRLSQDDINGIQSLYGPPPDSPETPLVPTEPVPPEPGTPANCDPALSFDAVSTLRGEILIFKDRHFWRKSLRKLEPELHLISSFWPSLPSGVDAAYEVTSKDLVFIFKGNQFWAIRGNEVRAGYPRGIHTLGFPPTVRKIDAAISDKEKNKTYFFVEDKYWRFDEKRNSMEPGFPKQIAEDFPGIDSKIDAVFEEFGFFYFFTGSSQLEFDPNAKKVTHTLKSNSWLNC

SEQ ID NO: 1083 - DNA, 1446 bp, Homo sapiens
  CDS (1)..(1446)
ggatccaccatgaagagtcttccaatcctactgttgctgtgcgtggcagtttgctcagcctatccattggatggagctgcaaggggtgaggacaccagcatgaaccttgttcagaaatatctagaaaactactacgacctcgaaaaagatgtgaaacagtttgttaggagaaaggacagtggtcctgttgttaaaaaaatccgagaaatgcagaagttccttggattggaggtgacggggaagctggactccgacactctggaggtgatgcgcaagcccaggtgtggagttcctgacgttggtcacttcagaacctttcctggcatcccgaagtggaggaaaacccaccttacatacaggattgtgaattatacaccagatttgccaaaagatgctgttgattctgctgttgagaaagctctgaaagtctgggaagaggtgactccactcacattctccaggctgtatgaaggagaggctgatataatgatctcttttgcagttagagaacatggagacttttacccttttgatggacctggaaatgttttggcccatgcctatgcccctgggccagggattaatggagatgcccactttgatgatgatgaacaatggacaaaggatacaacagggaccaatttatttctcgttgctgctcatgaaattggccactccctgggtctctttcactcagccaacactgaagctttgatgtacccactctatcactcactcacagacctgactcggttccgcctgtctcaagatgatataaatggcattcagtccctctatggacctccccctgactcccctgagacccccctggtacccacggaacctgtccctccagaacctgggacgccagccaactgtgatcctgctttgtcctttgatgctgtcagcactctgaggggagaaatcctgatctttaaagacaggcacttttggcgcaaatccctcaggaagcttgaacctgaattgcatttgatctcttcattttggccatctcttccttcaggcgtggatgccgcatatgaagttactagcaaggacctcgttttcatttttaaaggaaatcaattctgggccatcagaggaaatgaggtacgagctggatacccaagaggcatccacaccctaggtttccctccaaccgtgaggaaaatcgatgcagccatttctgataaggaaaagaacaaaacatatttctttgtagaggacaaatactggagatttgatgagaagagaaattccatggagccaggctttcccaagcaaatagctgaagactttccagggattgactcaaagattgatgctgtttttgaagaatttgggttcttttatttctttactggatcttcacagttggagtttgacccaaatgcaaagaaagtgacacacactttgaagagtaacagctggcttaattgtctcgag

SEQ ID NO: 1084 - protein, 482 aa, Homo sapiens
GSTMKSLPILLLLCVAVCSAYPLDGAARGEDTSMNLVQKYLENYYDLEKDVKQFVRRKDSGPVVKKIREMQKFLGLEVTGKLDSDTLEVMRKPRCGVPDVGHFRTFPGIPKWRKTHLTYRIVNYTPDLPKDAVDSAVEKALKVWEEVTPLTFSRLYEGEADIMISFAVREHGDFYPFDGPGNVLAHAYAPGPGINGDAHFDDDEQWTKDTTGTNLFLVAAHEIGHSLGLFHSANTEALMYPLYHSLTDLTRFRLSQDDINGIQSLYGPPPDSPETPLVPTEPVPPEPGTPANCDPALSFDAVSTLRGEILIFKDRHFWRKSLRKLEPELHLISSFWPSLPSGVDAAYEVTSKDLVFIFKGNQFWAIRGNEVRAGYPRGIHTLGFPPTVRKIDAAISDKEKNKTYFFVEDKYWRFDEKRNSMEPGFPKQIAEDFPGIDSKIDAVFEEFGFFYFFTGSSQLEFDPNAKKVTHTLKSNSWLNCLE

SEQ ID NO: 1085 - DNA, 1821 bp, Homo sapiens
  CDS (64)..(1494)
acaaggaggcaggcaagacagcaaggcatagagacaacatagagctaagtaaagccagtggaaatgaagagtcttccaatcctactgttgctgtgcgtggcagtttgctcagcctatccattggatggagctgcaaggggtgaggacaccagcatgaaccttgttcagaaatatctagaaaactactacgacctcaaaaaagatgtgaaacagtttgttaggagaaaggacagtggtcctgttgttaaaaaaatccgagaaatgcagaagttccttggattggaggtgacggggaagctggactccgacactctggaggtgatgcgcaagcccaggtgtggagttcctgatgttggtcacttcagaacctttcctggcatcccgaagtggaggaaaacccaccttacatacaggattgtgaattatacaccagatttgccaaaagatgctgttgattctgctgttgagaaagctctgaaagtctgggaagaggtgactccactcacattctccaggctgtatgaaggagaggctgatataatgatctcttttgcagttagagaacatggagacttttacccttttgatggacctggaaatgttttggcccatgcctatgcccctgggccagggattaatggagatgcccactttgatgatgatgaacaatggacaaaggatacaacagggaccaatttatttctcgttgctgctcatgaaattggccactccctgggtctctttcactcagccaacactgaagctttgatgtacccactctatcactcactcacagacctgactcggttccgcctgtctcaagatgatataaatggcattcagtccctctatggacctccccctgactcccctgagacccccctggtacccacggaacctgtccctccagaacctgggacgccagccaactgtgatcctgctttgtcctttgatgctgtcagcactctgaggggagaaatcctgatctttaaagacaggcacttttggcgcaaatccctcaggaagcttgaacctgaattgcatttgatctcttcattttggccatctcttccttcaggcgtggatgccgcatatgaagttactagcaaggacctcgttttcatttttaaaggaaatcaattctgggccatcagaggaaatgaggtacgagctggatacccaagaggcatccacaccctaggtttccctccaaccgtgaggaaaatcgatgcagccatttctgataaggaaaagaacaaaacatatttctttgtagaggacaaatactggagatttgatgagaagagaaattccatggagccaggctttcccaagcaaatagctgaagactttccagggattgactcaaagattgatgctgtttttgaagaatttgggttcttttatttctttactggatcttcacagttggagtttgacccaaatgcaaagaaagtgacacacactttgaagagtaacagctggcttaattgttgaaagagatatgtagaaggcacaatatgggcactttaaatgaagctaataattcttcacctaagtctctgtgaattgaaatgttcgttttctcctgcctgtgctgtgactcgagtcacactcaagggaacttgagcgtgaatctgtatcttgccggtcatttttatgttattacagggcattcaaatgggctgctgcttagcttgcaccttgtcacatagagtgatctttcccaagagaaggggaagcactcgtgtgcaacagacaagtgactgtatctgtgtagactatttgcttatttaataaagacgatttgtcagttgtttt

SEQ ID NO: 1086 - protein, 477 aa, Homo sapiens
MKSLPILLLLCVAVCSAYPLDGAARGEDTSMNLVQKYLENYYDLKKDVKQFVRRKDSGPVVKKIREMQKFLGLEVTGKLDSDTLEVMRKPRCGVPDVGHFRTFPGIPKWRKTHLTYRIVNYTPDLPKDAVDSAVEKALKVWEEVTPLTFSRLYEGEADIMISFAVREHGDFYPFDGPGNVLAHAYAPGPGINGDAHFDDDEQWTKDTTGTNLFLVAAHEIGHSLGLFHSANTEALMYPLYHSLTDLTRFRLSQDDINGIQSLYGPPPDSPETPLVPTEPVPPEPGTPANCDPALSFDAVSTLRGEILIFKDRHFWRKSLRKLEPELHLISSFWPSLPSGVDAAYEVTSKDLVFIFKGNQFWAIRGNEVRAGYPRGIHTLGFPPTVRKIDAAISDKEKNKTYFFVEDKYWRFDEKRNSMEPGFPKQIAEDFPGIDSKIDAVFEEFGFFYFFTGSSQLEFDPNAKKVTHTLKSNSWLNC

SEQ ID NO: 1087 - DNA, 1446 bp, Homo sapiens; identical to SEQ ID NO: 1083
  CDS (10)..(1440)

SEQ ID NO: 1088 - protein, 477 aa, Homo sapiens [sequence omitted]

SEQ ID NO: 1089 - DNA, 1446 bp, Homo sapiens
  CDS (10)..(1440)
ggatccaccatgaagagtcttccaatcctactgttgctgtgcgtggcagtttgctcagcctatccattggatggagctgcaaggggtgaggacaccagcatgaaccttgttcagaaatatctagaaaactactacgacctcaaaaaagatgtgaaacagtttgttaggagaaaggacagtggtcctgttgttaaaaaaatccgagaaatgcagaagttccttggattggaggtgacggggaagctggactccgacactctggaggtgatgcgcaagcccaggtgtggagttcctgacgttggtcacttcagaacctttcctggcatcccgaagtggaggaaaacccaccttacatacaggattgtgaattatacaccagatttgccaaaagatgctgttgattctgctgttgagaaagctctgaaagtctgggaagaggtgactccactcacattctccaggctgtatgaaggagaggctgatataatgatctcttttgcagttagagaacatggagacttttacccttttgatggacctggaaatgttttggcccatgcctatgcccctgggccagggattaatggagatgcccactttgatgatgatgaacaatggacaaaggatacaacagggaccaatttatttctcgttgctgctcatgaaattggccactccctgggtctctttcactcagccaacactgaagctttgatgtacccactctatcactcactcacagacctgactcggttccgcctgtctcaagatgatataaatggcattcagtccctctatggacctccccctgactcccctgagacccccctggtacccacggaacctgtccctccagaacctgggacgccagccaactgtgatcctgctttgtcctttgatgctgtcagcactctgaggggagaaatcctgatctttaaagacaggcacttttggcgcaaatccctcaggaagcttgaacctgaattgcatttgatctcttcattctggccatctcttccttcaggcgtggatgccgcatatgaagttactagcaaggacctcgttttcatttttaaaggaaatcaattctgggccatcagaggaaatgaggtacgagctggatacccaagaggcatccacaccctaggtttccctccaaccgtgaggaaaatcgatgcagccatttctgataaggaaaagaacaaaacatatttctttgtagaggacaaatactggagatttgatgagaagagaaattccatggagccaggctttcccaagcaaatagctgaagactttccagggattgactcaaagattgatgctgtttttgaagaatttgggttcttttatttctttactggatcttcacagttggagtttgacccaaatgcaaagaaagtgacacacactttgaagagtaacagctggcttaattgtctcgag

SEQ ID NO: 1090 - protein, 477 aa, Homo sapiens; identical to SEQ ID NO: 1086

SEQ ID NO: 1091 - DNA, 1580 bp, Homo sapiens
  CDS (51)..(1481)
caagacagcaaggcatagagacaacatagagctaagtaaagccagtggaaatgaagagtcttccaatcctactgttgctgtgcgtggcagtttgctcagcctatccattggatggagctgcaaggggtgaggacaccagcatgaaccttgttcagaaatatctagaaaactactacgacctcaaaaaagatgtgaaacagtttgttaggagaaaggacagtggtcctgttgttaaaaaaatccgagaaatgcagaagttccttggattggaggtgacggggaagctggactccgacactctggaggtgatgcgcaagcccatgtgtggagttcctgacgttggtcacttcagaacctttcctggcatcccgaagtggaggaaaacccaccttacatacaggattgtgaattatacaccagatttgccaaaagatgctgttgattctgctgttgagaaagctctgaaagtctgggaagaggtgactccactcacattctccaggctgtatgaaggagagactgatataatgatctcttttgcagttagagaacatggagacttttacccttttgatggacctggaaatgttttggcccatgcctatgcccctgggccagggattaatggagatgcccactttgatgatgatgaacaatggacaaaggatacaacagggaccaatttatttctcgttgctgctcatgaaattggccactccctgggtctctttcactcagccaacactgaagctttgatgtacccactctatcactcactcacagacctgactcggttccgcctgtctcaagatgatataaatggcattcagtccctctatggacctccccctgactcccctgagacccccctggtacccacggaacctgtccctccagaacctgggacgccagccaactgtgatcctgctttgtcctttgatgctgtcagcactctgaggggagaaatcctgatctttaaagacaggcacttttggcgcaaatccctcaggaagcttgaacctgaattgcatttgatctcttcattttggccatctcttccttcaggcgtggatgccgcatatgaagttactagcaaggacctcgttttcatttttaaaggaaatcaattctgggccatcagaggaaatgaggtacgagctggatacccaagaggcatccacaccctaggtttccctccaaccgtgaggaaaatcgatgcagccatttctgataaggaaaagaacaaaacatatttctttgtagaggacaaatactggagatttgatgagaagagaaattccatggagccaggctttcccaagcaaatagctgaagactttccagggattgactcaaagattgatgctgtttttgaagaatttgggttcttttatttctttactggatcttcacagttggagtttgacccaaatgcaaagaaagtgacacacactttgaagagtaacagctggcttaattgttgaaagagatatgtagaaggcacaatatgggcactttaaatgaagctaataattcttcacctaagtctctgtgaattgaaatgttcgttttctcctgct

SEQ ID NO: 1092 - protein, 477 aa, Homo sapiens
MKSLPILLLLCVAVCSAYPLDGAARGEDTSMNLVQKYLENYYDLKKDVKQFVRRKDSGPVVKKIREMQKFLGLEVTGKLDSDTLEVMRKPMCGVPDVGHFRTFPGIPKWRKTHLTYRIVNYTPDLPKDAVDSAVEKALKVWEEVTPLTFSRLYEGETDIMISFAVREHGDFYPFDGPGNVLAHAYAPGPGINGDAHFDDDEQWTKDTTGTNLFLVAAHEIGHSLGLFHSANTEALMYPLYHSLTDLTRFRLSQDDINGIQSLYGPPPDSPETPLVPTEPVPPEPGTPANCDPALSFDAVSTLRGEILIFKDRHFWRKSLRKLEPELHLISSFWPSLPSGVDAAYEVTSKDLVFIFKGNQFWAIRGNEVRAGYPRGIHTLGFPPTVRKIDAAISDKEKNKTYFFVEDKYWRFDEKRNSMEPGFPKQIAEDFPGIDSKIDAVFEEFGFFYFFTGSSQLEFDPNAKKVTHTLKSNSWLNC

SEQ ID NO: 1093 - DNA, 1983 bp, Homo sapiens
  CDS (6)..(1835)
gcagcatgagccgatcacccctcaatcccagccaactccgatcagtgggctcccaggatgccctggcccccttgcctccacctgctccccagaatccctccacccactcttgggaccctttgtgtggatctctgccttggggcctcagctgtcttctggctctgcagcatgtcttggtcatggcttctctgctctgtgtctcccacctgctcctgctttgcagtctctccccaggaggactctcttactccccttctcagctcctggcctccagcttcttttcatgtggtatgtctaccatcctgcaaacttggatgggcagcaggctgcctcttgtccaggctccatccttagagttccttatccctgctctggtgctgaccagccagaagctaccccgggccatccagacacctggaaactcctccctcatgctgcacctttgtaggggacctagctgccatggcctggggcactggaacacttctctccaggaggtgtccggggcagtggtagtatctgggctgctgcagggcatgatggggctgctggggagtcccggccacgtgttcccccactgtgggcccctggtgctggctcccagcctggttgtggcagggctctctgcccacagggaggtagcccagttctgcttcacacactgggggttggccttgctggttatcctgctcatggtggtctgttctcagcacctgggctcctgccagtttcatgtgtgcccctggaggcgagcttcaacgtcatcaactcacactcctctccctgtcttccggctcctttcggtgctgatcccagtggcctgtgtgtggattgtttctgcctttgtgggattcagtgttatcccccaggaactgtctgcccccaccaaggcaccatggatttggctgcctcacccaggtgagtggaattggcctttgctgacgcccagagctctggctgcaggcatctccatggccttggcagcctccaccagttccctgggctgctatgccctgtgtggccggctgctgcatttgcctcccccacctccacatgcctgcagtcgagggctgagcctggaggggctgggcagtgtgctggccgggctgctgggaagccccatgggcactgcatccagcttccccagcgtgggcaaagtgggtcttatccaggctggatctcagcaagtggctcacttagtggggctactctgcgtggggcttggactctcccccaggttggctcagctcctcaccaccatcccactgcctgttgttggtggggtgctgggggtgacccaggctgtggttttgtctgctggattctccagcttctacctggctgacatagactctgggcgaaatatcttcattgtgggcttctccatcttcatggccttgctgctgccaagatggtttcgggaagccccagtcctgttcagcacaggctggagccccttggatgtattactgcactcactgctgacacagcccatcttcctggctggactctcaggcttcctactagagaacacgattcctggcacacagcttgagcgaggcctaggtcaagggctaccatctcctttcactgcccaagaggctcgaatgcctcagaagcccagggagaaggctgctcaagtgtacagacttcctttccccatccaaaacctctgtccctgcatcccccagcctctccactgcctctgcccactgcctgaagaccctggggatgaggaaggaggctcctctgagccagaagagatggcagacttgctgcctggctcaggggagccatgccctgaatctagcagagaagggtttaggtcccagaaatgaccagaacgcctacttctgccctggttaatttagccctaactctcatctgctggagagtcagctcccaaactgttctttcttgtaggcagaggatatgtgtgtgtgtattacatgggactgtctagaggttccatttcccaatagg

SEQ ID NO: 1094 - protein, 610 aa, Homo sapiens
MSRSPLNPSQLRSVGSQDALAPLPPPAPQNPSTHSWDPLCGSLPWGLSCLLALQHVLVMASLLCVSHLLLLCSLSPGGLSYSPSQLLASSFFSCGMSTILQTWMGSRLPLVQAPSLEFLIPALVLTSQKLPRAIQTPGNSSLMLHLCRGPSCHGLGHWNTSLQEVSGAVVVSGLLQGMMGLLGSPGHVFPHCGPLVLAPSLVVAGLSAHREVAQFCFTHWGLALLVILLMVVCSQHLGSCQFHVCPWRRASTSSTHTPLPVFRLLSVLIPVACVWIVSAFVGFSVIPQELSAPTKAPWIWLPHPGEWNWPLLTPRALAAGISMALAASTSSLGCYALCGRLLHLPPPPPHACSRGLSLEGLGSVLAGLLGSPMGTASSFPSVGKVGLIQAGSQQVAHLVGLLCVGLGLSPRLAQLLTTIPLPVVGGVLGVTQAVVLSAGFSSFYLADIDSGRNIFIVGFSIFMALLLPRWFREAPVLFSTGWSPLDVLLHSLLTQPIFLAGLSGFLLENTIPGTQLERGLGQGLPSPFTAQEARMPQKPREKAAQVYRLPFPIQNLCPCIPQPLHCLCPLPEDPGDEEGGSSEPEEMADLLPGSGEPCPESSREGFRSQK

SEQ ID NO: 1095 - DNA, 2014 bp, Homo sapiens
  CDS (6)..(1991)
gcagcatgagccgatcacccctcaatcccagccaactccgatcagtgggctcccaggatgccctggcccccttgcctccacctgctccccagaatccctccacccactcttgggaccctttgtgtggatctctgccttggggcctcagctgtcttctggctctgcagcatgtcttggtcatggcttctctgctctgtgtctcccacctgctcctgctttgcagtctctccccaggaggactctcttactccccttctcagctcctggcctccagcttcttttcatgtggtatgtctaccatcctgcaaacttggatgggcagcaggaggctgcctcttgtccaggctccatccttagagttccttatccctgctctggtgctgaccagccagaagctaccccgggccatccagacacctggaaacgcctccctcatgctgcacctttgtaggggacctagctgccatggcctggggcactggaacacttctctccaggaggtggtggtagtatctgggctgctgcagggcatgatggggctgctggggagtcccggccacgtgttcccccactgtgggcccctggtgctggctcccagcctggttgtggcagggctctctgcctttccccaagagggagttttgctcctgtcacccagcctggagtgcaatggcatgatctcggctcaccactggggagaagccagccagctctgcctcctggccctggagtgctcactccatcccctaccttttggcttctgtctacccctgcaaggctggctcagaaggttctgggggaggagttcttttctcagtctcgcccctcaggtgctgatcccagtggcctgtgtgtggattgtttctgcctttgtgggattcagtgttatcccccaggaactgtctgcccccaccaaggcaccatggatttggctgcctcacccaggtgtgtggaattggcctttgctgacgcccagagctctggctgcaggcatctccatggccttggcagcctccaccagttccctgggctgctatgccctgtgtggccggctgctgcatttgcctcccccacctccacatgcctgcagtcgagggctgagcctggaggggctgggcagtgtgctggccgggctgctgggaagccccatgggcactgcatccagcttccccaacgtgggcaaagtgggtcttatccagcaggctggatctcagcaagtggctcacttagtggggctactctgcgtggggcttggactctcccccaggttggctcagctcctcaccaccatcccactgcctgttgttggtggtggggtgctgggggtgacccaggctgtggttttgtctgctggattctccagcttctacctggctgacatagactctgggcgaaatatcttcattgtgggcttctccatcttcatggccttgctgctgccaagatggtttcgggaagccccagtcctgttcagcacaggtcactcactgctgatggagccccttggatgtattactgcacagcccatcttcctggctggactctcaggcttcctactagagaacacgattcggggcacacagcttgagcgaggcctaggtcaagggctaccatctcctttcactgcccaagaggctcgaatgcctcagaagcccagggagaaggctgctcaagtgtacagacttcctttccccatccaaaacctctgtccctgcatcccccagcctctccactgcctctgcccactgcctgaagaccctggggatgaggaaggaggctcctctgagcagcaagagatggcagacttgctgcgtggctcaggggagcatgccctgaatctagcagagaagggtttaggtccagaaatgaccagaacgcgtacttctgccctggttaatttagccctaactctcatctgctggagagtcagctcccaaactgttctttcttgtaggcagaggatatgtgtgtgtgtattacatgggactgtctagaggttccatttcccaatagg

SEQ ID NO: 1096 - protein, 662 aa, Homo sapiens
MSRSPLNPSQLRSVGSQDALAPLPPPAPQNPSTHSWDPLCGSLPWGLSCLLALQHVLVMASLLCVSHLLLLCSLSPGGLSYSPSQLLASSFFSCGMSTILQTWMGSRRLPLVQAPSLEFLIPALVLTSQKLPRAIQTPGNASLMLHLCRGPSCHGLGHWNTSLQEVVVVSGLLQGMMGLLGSPGHVFPHCGPLVLAPSLVVAGLSAFPQEGVLLLSPSLECNGMISAHHWGEASQLCLLALECSLHPLPFGFCLPLQGWLRRFWGRSSFLSLAPQVLIPVACVWIVSAFVGFSVIPQELSAPTKAPWIWLPHPGVWNWPLLTPRALAAGISMALAASTSSLGCYALCGRLLHLPPPPPHACSRGLSLEGLGSVLAGLLGSPMGTASSFPNVGKVGLIQQAGSQQVAHLVGLLCVGLGLSPRLAQLLTTIPLPVVGGGVLGVTQAVVLSAGFSSFYLADIDSGRNIFIVGFSIFMALLLPRWFREAPVLFSTGHSLLMEPLGCITAQPIFLAGLSGFLLENTIRGTQLERGLGQGLPSPFTAQEARMPQKPREKAAQVYRLPFPIQNLCPCIPQPLHCLCPLPEDPGDEEGGSSEQQEMADLLRGSGEHALNLAEKGLGPEMTRTRTSALVNLALTLICWRVSSQTVLSCRQRICVCVLHGTV

SEQ ID NO: 1097 - DNA, 1542 bp, Homo sapiens
  CDS (1)..(1467)
atggatgactacatggtcctgagaatgattggggagggctccttcggcagagctcttttggttcagcatgaaagcagtaatcagatgtttgccatgaaagaaataaggcttcccaagtctaatacacagaattctaggaaggaggctgttcttttagccaaaatgaaacaccctaatattgttgccttcaaagaatcatttgaagctgaaggacacttgtatattgtgatggaatactgtgatggaggggatctaatgcaaaagattaaacagcagaaaggaaagttatttcctgaagacatacttaattggtttacccaaatgtgccttggagtaaatcacattcacaagaaacgtgtgctacacagagatatcaagtccaagaatatcttcctcactcagaatggaaaagtgaaattgggagactttggatctgcccgtcttctctccagtccgatggcatttgcttgtacctatgtgggaactccttattatgtgcctccagaaatttgggaaaacctgccttataacaataaaagtgacatctggtccttgggttgcatcctgtatgaactctgtacccttaagcatccatttcaggcaaatagttggaaaaatcttatcctcaaagtatgtcaagggtgcatcagtccactgccgtctcattactcctatgaacttcagttcctagtcaagcagatgtttaaaaggaatccctcacatcgcccctcggctacaacgcttctctctcgaggcatcgtagctcggcttgtccagaagtgcttacccccccagatcatcatggaatatggtgaggaagtattagaagaaataaaaaattcgaagcataacacaccaagaaaaaaatctcttttaaagcaagaggaagaacaagatagaaagggtagccatactgatttggaaagcattaatgaaaatttagttgaaagtgcattgagaagagtaaacagaaaatcaggtaataagtcagtccatctgaggaaagccagttcaccaaatcttcatagacgacagtgggagaaaaatgtacccaatacagctcttacagctttggaaaatgcatccatactcacctccagtttaacagcagaggacgatagaggtggtggttctgtaataaagtacagcaaaaatactactcgtaagcagtggctcaaagagacccctgacactttgttgaacatccttaagaatgctgatctcagcttggcttttcaaacatacacaatatatagaccaggttcagaagggttcttgaaaggccccctgtctgaagaaacagaagcatcggacagtgttgatggaggtcacgattctgtcattttggatccagagcgacttgagcctgggctagatgaggaggacacggactttgaggaggaagatgacaaccccgactgggtgtcagagctgaagaagcgagctggatggcaaggcctgtgcgacagataatgcctgaggaaatgttcctgagtcacgctgaggagaggcttcactcaggagttcatgctgagatgatca

SEQ ID NO: 1098 - protein, 489 aa, Homo sapiens
MDDYMVLRMIGEGSFGRALLVQHESSNQMFAMKEIRLPKSNTQNSRKEAVLLAKMKHPNIVAFKESFEAEGHLYIVMEYCDGGDLMQKIKQQKGKLFPEDILNWFTQMCLGVNHIHKKRVLHRDIKSKNIFLTQNGKVKLGDFGSARLLSSPMAFACTYVGTPYYVPPEIWENLPYNNKSDIWSLGCILYELCTLKHPFQANSWKNLILKVCQGCISPLPSHYSYELQFLVKQMFKRNPSHRPSATTLLSRGIVARLVQKCLPPQIIMEYGEEVLEEIKNSKHNTPRKKSLLKQEEEQDRKGSHTDLESINENLVESALRRVNRKSGNKSVHLRKASSPNLHRRQWEKNVPNTALTALENASILTSSLTAEDDRGGGSVIKYSKNTTRKQWLKETPDTLLNILKNADLSLAFQTYTIYRPGSEGFLKGPLSEETEASDSVDGGHDSVILDPERLEPGLDEEDTDFEEEDDNPDWVSELKKRAGWQGLCD

SEQ ID NO: 1099 - DNA, 2257 bp, Homo sapiens
  CDS (246)..(1763)
ccgcaagtccctcgccgccttggggtctgggcgcgcggtccgtgggggtcagcagggcgagcggcttttccaggagaaagggccctcacgggtgagcggggcgactgggctcccccgcggtgcagttgccccgcgcgaccggccccggcttcaacggattcttctcgctcgctgcccggaaagaaccatttgggagagcccatggtgactgcgtgagtggagcccagctgtgtggatgccccagcatggatgactacatggtcctgagaatgattggggagggctccttcggcagagctcttttggttcagcatgaaagcagtaatcagatgtttgccatgaaagaaataaggcttcccaaggtcactactaatacacagaattctaggaaggaggctgttcttttagccaaaatgaaacaccctaatattgttgccttcaaagaatcatttgaagctgaaggacacttgtatattgtgatggaatactgtgatggaggggatctaatgcaaaagattaaacagcagaaaggaaagttatttcctgaagaccagatacttaattggtttacccaaatgtgccttggagtaaatcacattcacaagaaacgtgtgctacacagagatatcaagtcccagaatatcttcctcactcagaatggaaaagtgaaattgggagactttggatctgcccgtcttctctccaatccgatggcatttgcttgtacctatgtgggaactccttattatgtgcctccagaaatttgggaaaacctgccttataacaataaaagtgacatctggtccttgggttgcatcctgtatgaactctgtacccttaagcatccatttcaggcaaatagttggaaaaatcttatcctcaaagtatgtcaagggtgcatcagtccactgccgtctcattactcctatgaacttcagttcctagtcaagcagatgtttaaaaggaatccctcacatcgcccctcggctacaacgcttctctctcgaggcatcgtagctcggcttgtccagaagtgcttaccccccgagatcatcatggaatatggtgaggaagtattagaagaaataaaaaattcgaagcataacacaccaagaaaaaaaacaaaccccagcagaatcaggatagctttgggaaatgaagcaagcacagtgcaagaggaagaacaagatagaaagggtagccatactgatttggaaagcattaatgaaaatttagttgaaagtgcattgagaagagtaaacagagaagaaaaaggtaataagtcagtccatctgaggaaagccagttcaccaaatcttcatagacgacagtgggagaaaaatgtacccaatacagctcttacagctttggaaaatgcatccatactcacctccagtttaacagcagaggacgatagaggtggttctgtaataaagtacagcaaaaatactactcgtaagcagtggctcaaagagacccctgacactttgttgaacatccttaagaatgctgatctcagcttggcttttcaaacatacacaatatatagaccaggttcagaagggttcttgaaaggccccctgtctgaagaaacagaagcatcggacagtgttgatggaggtcacgattctgtcattttggatccagagcgacttgagcctgggctagatgaggaggacacggactttgaggaggaagatgacaaccccgactgggtgtcagagctgaagaagcgagctggatggcaaggcctgtgcgacagataatgcctgaggaaatgttcctgagtcacgctgaggagagccttcactcaggagttcatgctgagatgatcatgagttcatgcgacgtatattttcctttggaaacagaatgaagcagaggaaactcttaatacttaaaatcgttcttgattagtatcgtgagtttgaaaagtctagaactcctgtaagtttttgaactcaagggagaaggtatagtggaatgagtgtgagcatcgggctttgcagtcccatagaacagaaatgggatgctagcgtgccactacctacttgtgtgattgtgggaaattacttaacctcttcaagccccaatttcctcaaccataaaatgaagataataatgcctacctcagagggatgctgaccacagacctttatagcagcccgtatgatattattcacattatgatatgtgtttattattatgtgactctttttacatttcctaaaggtttgagaattaaatatatttaatt

SEQ ID NO: 1100 - protein, 506 aa, Homo sapiens
MDDYMVLRMIGEGSFGRALLVQHESSNQMFAMKEIRLPKVTTNTQNSRKEAVLLAKMKHPNIVAFKESFEAEGHLYIVMEYCDGGDLMQKIKQQKGKLFPEDQILNWFTQMCLGVNHIHKKRVLHRDIKSQNIFLTQNGKVKLGDFGSARLLSNPMAFACTYVGTPYYVPPEIWENLPYNNKSDIWSLGCILYELCTLKHPFQANSWKNLILKVCQGCISPLPSHYSYELQFLVKQMFKRNPSHRPSATTLLSRGIVARLVQKCLPPEIIMEYGEEVLEEIKNSKHNTPRKKTNPSRIRIALGNEASTVQEEEQDRKGSHTDLESINENLVESALRRVNREEKGNKSVHLRKASSPNLHRRQWEKNVPNTALTALENASILTSSLTAEDDRGGSVIKYSKNTTRKQWLKETPDTLLNILKNADLSLAFQTYTIYRPGSEGFLKGPLSEETEASDSVDGGHDSVILDPERLEPGLDEEDTDFEEEDDNPDWVSELKKRAGWQGLCDR

SEQ ID NO: 1101 - DNA, 1781 bp, Homo sapiens
  CDS (246)..(1712)
ccgcaagtccctcgccgccttggggtctgggcgcgcggtccgtgggggtcagcagggcgagcggcttttccaggagaaagggccctcacgggtgagcggggcgactgggctcccccgcggtgcagttgccccgcgcgaccggccccggcttcaacggattcttctcgctcgctgcccggaaagaaccatttgggagagcccatggtgactgcgtgagtggagcccagctgtgtggatgccccagcatggatgactacatggtcctgagaatgattggggagggctccttcggcagagctcttttggttcagcatgaaagcagtaatcagatgtttgccatgaaagaaataaggcttcccaaggtcactactaatacacagaattctaggaaggaggctgttcttttagccaaaatgaaacaccctaatattgttgccttcaaagaatcatttgaagctgaaggacacttgtatattgtgatggaatactgtgatggaggggatctaatgcaaaagattaaacagcagaaaggaaagttatttcctgaagaccagatacttaattggtttacccaaatgtgccttggagtaaatcacattcacaagaaacgtgtgctacacagagatatcaagtcccagaatatcttcctcactcagaatggaaaagtgaaattgggagactttggatctgcccgtcttctctccaatccgatggcatttgcttgtacctatgtgggaactccttattatgtgcctccagaaatttgggaaaacctgccttataacaataaaagtgacatctggtccttgggttgcatcctgtatgaactctgtacccttaagcatccatttcaggcaaatagttggaaaaatcttatcctcaaagtatgtcaagggtgcatcagtccactgccgtctcattactcctatgaacttcagttcctagtcaagcagatgtttaaaaggaatccctcacatcgcccctcggctacaacgcttctctctcgaggcatcgtagctcggcttgtccagaagtgcttaccccccgagatcatcatggaatatggtgaggaagtattagaagaaataaaaaattcgaagcataacacaccaagaaaaaaacaagaggaagaacaagatagaaagggtagccatactgatttggaaagcattaatgaaaatttagttgaaagtgcattgagaagagtaaacagagaagaaaaaggtaataagtcagtccatctgaggaaagccagttcaccaaatcttcatagacgacagtgggagaaaaatgtacccaatacagctcttacagctttggaaaatgcatccatactcacctccagtttaacagcagaggacgatagaggtggttctgtaataaagtacagcaaaaatactactcgtaagcagtggctcaaagagacccctgacactttgttgaacatccttaagaatgctgatctcagcttggcttttcaaacatacacaatatatagaccaggttcagaagggttcttgaaaggccccctgtctgaagaaacagaagcatcggacagtgttgatggaggtcacgattctgtcattttggatccagagcgacttgagcctgggctagatgaggaggacacggactttgaggaggaagatgacaaccccgactgggtgtcagagctgaagaagcgagctggatggcaaggcctgtgcgacagataatgcctgaggaaatgttcctgagtcacgctgaggagaggcttcactctaggagttcatgctgagatg

SEQ ID NO: 1102 - protein, 489 aa, Homo sapiens
MDDYMVLRMIGEGSFGRALLVQHESSNQMFAMKEIRLPKVTTNTQNSRKEAVLLAKMKHPNIVAFKESFEAEGHLYIVMEYCDGGDLMQKIKQQKGKLFPEDQILNWFTQMCLGVNHIHKKRVLHRDIKSQNIFLTQNGKVKLGDFGSARLLSNPMAFACTYVGTPYYVPPEIWENLPYNNKSDIWSLGCILYELCTLKHPFQANSWKNLILKVCQGCISPLPSHYSYELQFLVKQMFKRNPSHRPSATTLLSRGIVARLVQKCLPPEIIMEYGEEVLEEIKNSKHNTPRKKQEEEQDRKGSHTDLESINENLVESALRRVNREEKGNKSVHLRKASSPNLHRRQWEKNVPNTALTALENASILTSSLTAEDDRGGSVIKYSKNTTRKQWLKETPDTLLNILKNADLSLAFQTYTIYRPGSEGFLKGPLSEETEASDSVDGGHDSVILDPERLEPGLDEEDTDFEEEDDNPDWVSELKKRAGWQGLCDR

SEQ ID NO: 1103 - DNA, 1588 bp, Homo sapiens
  CDS (246)..(1520)
ccgcaagtccctcgccgccttggggtctgggcgcgcggtccgtgggggtcagcagggcgagcggcttttccaggagaaagggccctcacgggtgagcggggcgactgggctcccccgcggtgcagttgccccgcgcgaccggccccggcttcaacggattcttctcgctcgctgcccggaaagaaccatttgggagagcccatggtgactgcgtgagtggagcccagctgtgtggatgccccagcatggatgactacatggtcctgagaatgattggggagggctccttcggcagagctcttttggttcagcatgaaagcagtaatcagatgtttgccatgaaagaaataaggcttcccaaggtcactactaatacacagaattctaggaaggaggctgttcttttagccaaaatgaaacaccctaatattgttgccttcaaagaatcatttgaagctgaaggacacttgtatattgtgatggaatactgtgatggaggggatctaatgcaaaagattaaacagcagaaaggaaagttatttcctgaagaccagatacttaattggtttacccaaatgtgccttggagtaaatcacattcacaagaaacgtgtgctacacagagatatcaagtcccagaatatcttcctcactcagaatggaaaagtgaaattgggagactttggatctgcccgtctcctctccaatccgatggcatttgcttgtacctatgtgggaactccttattatgtgcctccagaaatttgggaaaacctgccttataacaataaaagtgacatctggtccttgggttgcatcctgtatgaactctgtacccttaagcatccatttcaggcaaatagttggaaaaatcttatcctcaaagtatgtcaagggtgcatcagtccactgccgtctcattactcctatgaacttcagttcctagtcaagcagatgtttaaaaggaatccctcacatcgcccctcggctacagcgcttctctctcgaggcatcgtagctcggcttgtccagaagtgcttaccccccgagatcatcatggaatatggtgaggaagtattagaagaaataaaaaattcgaagcataacacaccaagaaaaaaacaagaggaagaacaagatagaaagggtagccatactgatttggaaagcattaatgaaaatttagttgaaagtgcattgagaagagtaaacagagaagaaaaaggtaataagtcagtccatctgaggaaagccagttcaccaaatcttcatagacgacagtgggagaaaaatgtacccaatacagctcttacagctttggaaaatgcatccatactcacctccagtttaacagcagaggacgatagaggttcagaagggttcttgaaaggccccctgtctgaagaaacagaagcatcggacagtgttgaggaggacacggactttgaggaggaagatgacaaccccgactgggtgtcagagctgaagaagcgagctggatggcaaggcctgtgcgacagataatgcctgaggaaatgtacctgagtcacgctgaggagaggcttcactcaggagttcatgctgagatg

SEQ ID NO: 1104 - protein, 425 aa, Homo sapiens
MDDYMVLRMIGEGSFGRALLVQHESSNQMFAMKEIRLPKVTTNTQNSRKEAVLLAKMKHPNIVAFKESFEAEGHLYIVMEYCDGGDLMQKIKQQKGKLFPEDQILNWFTQMCLGVNHIHKKRVLHRDIKSQNIFLTQNGKVKLGDFGSARLLSNPMAFACTYVGTPYYVPPEIWENLPYNNKSDIWSLGCILYELCTLKHPFQANSWKNLILKVCQGCISPLPSHYSYELQFLVKQMFKRNPSHRPSATALLSRGIVARLVQKCLPPEIIMEYGEEVLEEIKNSKHNTPRKKQEEEQDRKGSHTDLESINENLVESALRRVNREEKGNKSVHLRKASSPNLHRRQWEKNVPNTALTALENASILTSSLTAEDDRGSEGFLKGPLSEETEASDSVEEDTDFEEEDDNPDWVSELKKRAGWQGLCDR

SEQ ID NO: 1105 - DNA, 1542 bp, Homo sapiens
  CDS (1)..(1467)
atggatgactacatggtcctgagaatgattggggagggctccttcggcagagctcttttggttcagcatgaaagcagtaatcagatgtttgccgtgaaagaaataaggcttcccaagtctaatacacagaattctaggaaggaggctgttcttttagccaaaatgaaacaccctaatattgttgccttcaaagaatcatttgaagctgaaggacacttgtatattgtgatggaatactgtgatggaggggatctaatgcaaaagattaaacagcagaaaggaaagttatttcctgaagacatacttaattggtttacccaaatgtgccttggagtaaatcacattcacaagaaacgtgtgctacacagagatatcaagtccaagaatatcttcctcactcagaatggaaaagtgaaattgggagactttggatctgcccgtcttctctccagtccgatggcatttgcttgtacctatgtgggaactccttattatgtgcctccagaaatttgggaaaacctgccttataacaataaaagtgacatctggtccttgggttgcatcctgtatgaactctgtacccttaagcatccatttcaggcaaatagttggaaaaatcttatcctcaaagtatgtcaagggtgcatcagtccactgccgtctcattactcctatgaacttcagttcctagtcaagcagatgtttaaaaggaatccctcacatcgcccctcggctacaacgcttctctctcgaggcatcgtagctcggcttgtccagaagtgcttacccccccagatcatcatggaatatggtgaggaagtattagaagaaataaaaaattcgaagcataacacaccaagaaaaaaatctcttttaaagcaagaggaagaacaagatagaaagggtagccatactgatttggaaagcattaatgaaaatttagttgaaagtgcattgagaagagtaaacagaaaatcaggtaataagtcagtccatctgaggaaagccagttcaccaaatcttcatagacgacagtgggagaaaaatgtacccaatacagctcttacagctttggaaaatgcatccatactcacctccagtttaacagcagaggacgatagaggtggtggttctgtaataaagtacagcaaaaatactactcgtaagcagtggctcaaagagacccctgacactttgttgaacatccttaagaatgctgatctcagcttggcttttcaaacatacacaatatatagaccaggttcagaagggttcttgaaaggccccctgtctgaagaaacagaagcatcggacagtgttgatggaggtcacgattctgtcattttggatccagagcgacttgagcctgggctagatgaggaggacacggactttgaggaggaagatgacaaccccgactgggtgtcagagctgaagaagcgagctggatggcaaggcctgtgcgacagataatgcctgaggaaatgttcctgagtcacgctgaggagaggcttcactcaggagttcatgctgagatgatca

SEQ ID NO: 1106 - protein, 489 aa, Homo sapiens
MDDYMVLRMIGEGSFGRALLVQHESSNQMFAVKEIRLPKSNTQNSRKEAVLLAKMKHPNIVAFKESFEAEGHLYIVMEYCDGGDLMQKIKQQKGKLFPEDILNWFTQMCLGVNHIHKKRVLHRDIKSKNIFLTQNGKVKLGDFGSARLLSSPMAFACTYVGTPYYVPPEIWENLPYNNKSDIWSLGCILYELCTLKHPFQANSWKNLILKVCQGCISPLPSHYSYELQFLVKQMFKRNPSHRPSATTLLSRGIVARLVQKCLPPQIIMEYGEEVLEEIKNSKHNTPRKKSLLKQEEEQDRKGSHTDLESINENLVESALRRVNRKSGNKSVHLRKASSPNLHRRQWEKNVPNTALTALENASILTSSLTAEDDRGGGSVIKYSKNTTRKQWLKETPDTLLNILKNADLSLAFQTYTIYRPGSEGFLKGPLSEETEASDSVDGGHDSVILDPERLEPGLDEEDTDFEEEDDNPDWVSELKKRAGWQGLCD

SEQ ID NO: 1107 - DNA, 1542 bp, Homo sapiens
  CDS (1)..(1467)
atggatgactacatggtcctgagaatgattggggagggctccttcggcagagctcttttggttcagcatgaaagcagtaatcagatgtttgccatgaaagaaataaggcttcccaagtctaatacacagaattctaggaaggaggctgttcttttagccaaaatgaaacaccctaatattgttgccttcaaagaatcatttgaagctgaaggacacttgtatattgtgatggaatactgtgatggaggggatctaatgcaaaagattaaacagcagaaaggaaggttatttcctgaagacatacttaattggtttacccaaatgtgccttggagtaaatcacattcacaagaaacgtgtgctacacagagatatcaagtccaagaatatcttcctcactcagaatggaaaagtgaaattgggagactttggatctgcccgtcttctctccagtccgatggcatttgcttgtacctatgtgggaactccttattatgtgcctccagaaatttgggaaaacctgccttataacaataaaagtgacatctggtccttgggttgcatcctgtatgaactctgtacccttaagcatccatttcaggcaaatagttggaaaaatcttatcctcaaagtatgtcaagggtgcatcagtccactgccgtctcattactcctatgaacttcagttcctagtcaagcagatgtttaaaaggaatccctcacatcgcccctcggctacaacgcttctctctcgaggcatcgtagctcggcttgtccagaagtgcttacccccccagatcatcatggaatatggtgaggaagtattagaagaaataaaaaattcgaagcataacacaccaagaaaaaaatctcttttaaagcaagaggaagaacaagatagaaagggtagccatactgatttggaaagcattaatgaaaatttagttgaaagtgcattgagaagagtaaacagaaaatcaggtaataagtcagtccatctgaggaaagccagttcaccaaatcttcatagacgacagtgggagaaaaatgtacccaatacagctcttacagctttggaaaatgcatccatactcacctccagtttaacagcagaggacgatagaggtggtggttctgtaataaagtacagcaaaaatactactcgtaagcagtggctcaaagagacccctgacactttgttgaacatccttaagaatgctgatctcagcttggcttttcaaacatacacaatatatagaccaggttcagaagggttcttgaaaggccccctgtctgaagaaacagaagcatcggacagtgttgatggaggtcacgattctgtcattttggatccagagcgacttgagcctgggctagatgaggaggacacggactttgaggaggaagatgacaaccccgactgggtgtcagagctgaagaagcgagctggatggcaaggcctgtgcgacagataatgcctgaggaaatgttcctgagtcacgctgaggagaggcttcactcaggagttcatgctgagatgatca

SEQ ID NO: 1108 - protein, 489 aa, Homo sapiens
MDDYMVLRMIGEGSFGRALLVQHESSNQMFAMKEIRLPKSNTQNSRKEAVLLAKMKHPNIVAFKESFEAEGHLYIVMEYCDGGDLMQKIKQQKGRLFPEDILNWFTQMCLGVNHIHKKRVLHRDIKSKNIFLTQNGKVKLGDFGSARLLSSPMAFACTYVGTPYYVPPEIWENLPYNNKSDIWSLGCILYELCTLKHPFQANSWKNLILKVCQGCISPLPSHYSYELQFLVKQMFKRNPSHRPSATTLLSRGIVARLVQKCLPPQIIMEYGEEVLEEIKNSKHNTPRKKSLLKQEEEQDRKGSHTDLESINENLVESALRRVNRKSGNKSVHLRKASSPNLHRRQWEKNVPNTALTALENASILTSSLTAEDDRGGGSVIKYSKNTTRKQWLKETPDTLLNILKNADLSLAFQTYTIYRPGSEGFLKGPLSEETEASDSVDGGHDSVILDPERLEPGLDEEDTDFEEEDDNPDWVSELKKRAGWQGLCD

SEQ ID NO: 1109 - DNA, 1542 bp, Homo sapiens
  CDS (1)..(1467)
atggatgactacatggtcctgagaatgattggggagggctccttcggcagagctcttttggttcagcatgaaagcagtaatcagatgtttgccatgaaagaaataaggcttcccaagtctaatacacagaattctaggaaggaggctgttcttttagccaaaatgaaacaccctaatattgttgccttcaaagaatcatttgaagctgaaggacacttgtatattgtgatggaatactgtgatggaggggatctaatgcaaaagattaaacagcagaaaggaaagttatttcctgaagacatacttaattggtttacccaaatgtgccttggagtaaatcacattcacaagaaacgtgtgctacacagagatatcaagtccaagaatatcttcctcactcagaatggaaaagtgaaattgggagactttggatctgcccgtcttctctccagtccgatggcatttgcttgtacctatgtgggaactccttattatgtgcctccagaaatttgggaaaacctgccttataacaataaaagtgacatctggtccttgggttgcatcctgtatgaactctgtacccttaagcatccatttcaggcaaatagttggaaaaatcttatcctcaaagtatgtcaagggtgcatcagtccactgccgtctcattactcctatgaacttcagttcctagtcaagcagatgtttaaaaggaatccctcacatcgcccctcggctacaacgcttctctctcgaggcatcgtagctcggcttgtccagaagtgcttacccccccagatcatcatggaatatggtgaggaagtattagaagaaataaaaaattcgaagcataacacaccaagaaaaaaatctcttttaaagcaagaggaagaacaagatagaaagggtagccatactgatttggaaagcattaatgaaaatttagttgaaagtgcattgagaagagtaaacagaaaatcaggtaataagtcagtccatctgaggaaagccagttcaccaaatcttcatagacgacagtgggagaaaaatgtacccaatacagctcttacagctttggaaaatgcatccatactcacctccagtttaacagcagaggacgatagaggtggtggttctgtaataaagtacagcaaaaatactactcgtaagcagtggctcaaagagacccctgacactttgttgaacatccttaagaatgctgatctcagcttggcttttcaaacatacacaatatatagaccaggttcagaagggttcttgaaaggccccctgtctgaagaaacagaagcatcggacagtgttgatggaggtcacgattctgtcattttggatccagagcgacttgagcctgggctagatgaggaggacacggactttgaggaggaagatgacaaccccgactgggtgtcagagctgaagaagcgagctggatggcaaggcctgtgcgacagataatgcctgaggaaatgttcctgagtcacgctgaggagagccttcactcaggagttcatgctgagatgatca

SEQ ID NO: 1110 - protein, 489 aa, Homo sapiens; identical to SEQ ID NO: 1098

SEQ ID NO: 1111 - DNA, 2856 bp, Homo sapiens
  CDS (28)..(1293)
gggcggcgcggggtctgcgctggggccatggctccgccgcgccgcttcgtcctggagcttcccgactgcaccctggctcacttcgccctaggcgccgacgcccccggcgacgcagacgcccccgacccccgcctggcggcgctgctggggcccccggagcgcagctactcgctgtgcgtgcccgtgaccccggacgccggctgcggggcccgggtccgggcggcgcggctgcaccagcgcctgctgcaccagctgcgccgcggccccttccagcggtgccagctgctcaggctgctctgctactgcccgggcggccaggccggcggcgcacagcaaggcttcctgctgcgcgaccccctggatgaccctgacacccggcaagcgctgctcgagctgctgggcgcctgtcaggaggcaccacgcccgcacttgggcgagttcgaggccgacccgcgcggccagctgtggcagcgcctctgggaggtgcaagacggcaggcggctgcaggtgggctgcgcacaggtcgtgcccgtcccggagcccccgctgcacccggtggtgccagacttgcccagttccgtggtcttcccggaccgggaagccgcccgggccgttttggaggagtgtacctcctttattcctgaagcccgggcagtgcttgacctggtcgaccagtgcccaaaacagatccagaaaggaaagttccaggttgttgccatcgaaggactggatgccacgggtggtaaaaccacggtgacccagtcagtggcagattcacttaaggctgtcctcttaaagtcaccaccctcttgcattggccagtggaggaagatctttgatgatgaaccaactatcattagaagagctttttactctttgggcaattatattgtggcctccgaaatagctaaagaatctgccaaatctcctgtgattgtagacaggcacagcacggccacctatgccatagccactgaggtgagtgggggtctccagcacctgcccccagcccatcaccctgtgtaccagtggccagaggacctgctcaaacctgaccttatcctgctgctcactgtgagtcctgaggagaggttgcagaggctgcagggccggggcatggagaagaccagggaagaagcagaacttgaggccaacagtgtgtttcgtcaaaaggtagaaatgtcctaccagcggatggagaatcctggctgccatgtggttgatgccagcccctccagagaaaaggtcctgcagacggtattaagcctaatccagaatagttttagtgaaccgtagttactctggccaggtgccacgtctaactagattagatgttgtttgaaacatctacatccaccatttgttatgcagtgttcccaaatttctgttctacaagcatgttgtgtggcagaaaactggagaccaggcatcttaattttacttcagccatcgtaccctcttctgactgatggacccgtcatcacaaaggtccctctcatcatgttccagtgagaggccagcgattgctttcttcctggcatagtaaacattttcttggaacatatgtttcacttaatcactaccaaatatctggaagacctgtcttactcagacagcaccaggtgtacagaagcagcagacaagatcttccagatcagcagggagaccccggagcctctgcttctcctacactggcatgctgatgagatcgtgacatgcccacattggcttcttccacatctggttgcactcgtcatgatgggctcgctgcatctccctcagtcccaaattctagagccaagtgttcctgcagaggctgtctatgtgtcctggctgcccaaggacactcctgcagagccatttttgggtaaggaacacttacaaagaaggcattgatcttgtgtctgaggctcagagcccttttgataggcttctgagtcatatataaagacattcaagccaagatgctccaactgcaaatataccaaccttctctgaattatattttgcttatttatatttcttttctttttttctaaagtatggctctgaatagaatgcacattttccattgaactggatgcatttcatttagccaatccagtaatttatttatattaatctatacataatatgtttcctcagcataggagctatgattcattaattaaaagtggagtcaaaacgctaaatgcaatgtttgttgtgtattttcattacacaaacttaatttgtcttgttaaataagtacagtggatcttggagtgggatttcttggtaaattatcttgcacttgaatgtctcatgattacatatgaaatcgctttgacatatctttagacagaaaaaagtagctgagtgagggggaaattatagagctgtgtgactttagggagtaggttgaaccaggtgattacctaaaattccttccagttcaaaggcagataaatctgtaaattattttatcctatctaccatttcttaagaagacattactccaaaataattaaatttaaggctttatcaggtctgcatatagaatcttaaattctaataaagtttcatgttaatgtcataggatttttaaaagagctataggtaatttctatataatatgtgtatattaaaatgtaattgatttcagttgaaagtattttaaagctgataaatagcattagggttctttgcaatgtggtatctagctgtattattggttttatttactttaaacattttgaaaagcttatactggcagcctagaaaaacaaacaattaatgtatctttatgtccctggcacatgaataaactttgctgtggtttactaatctaaaaaaaaaaaaaaaagggcggccgct

SEQ ID NO: 1112 - protein, 422 aa, Homo sapiens
MAPPRRFVLELPDCTLAHFALGADAPGDADAPDPRLAALLGPPERSYSLCVPVTPDAGCGARVRAARLHQRLLHQLRRGPFQRCQLLRLLCYCPGGQAGGAQQGFLLRDPLDDPDTRQALLELLGACQEAPRPHLGEFEADPRGQLWQRLWEVQDGRRLQVGCAQVVPVPEPPLHPVVPDLPSSVVFPDREAARAVLEECTSFIPEARAVLDLVDQCPKQIQKGKFQVVAIEGLDATGGKTTVTQSVADSLKAVLLKSPPSCIGQWRKIFDDEPTIIRRAFYSLGNYIVASEIAKESAKSPVIVDRHSTATYAIATEVSGGLQHLPPAHHPVYQWPEDLLKPDLILLLTVSPEERLQRLQGRGMEKTREEAELEANSVFRQKVEMSYQRMENPGCHVVDASPSREKVLQTVLSLIQNSFSEP

SEQ ID NO: 1113 - DNA, 601 bp, Homo sapiens
  CDS (2)..(601)
caccggatccatcgaaggactggatgccacgggtggtaaaaccacggtgacccagtcagtggcagattcacttaaggctgtcctcttaaagtcaccaccctcttgcattggccagtggaggaagatctttgatgatgaaccaactatcattagaagagctttttactctttgggcaattatattgtggcctccgaaatagctaaagaatctgccaaatctcctgtgattgtagacaggtactggcacagcacggccacctatgccatagccactgaggtgagtgggggtctccagcacctgcccccagcccatcaccctgtgtaccagtggccagaggacctgctcaaacctgaccttatcctgctgctcactgtgagtcctgaggagaggttgcagaggctgcagggccggggcatggagaagaccagggaagaagcagaacttgaggccaacagtgtgtttcgtcaaaaggtagaaatgtcctaccagcggatggagaatcctggctgccatgtggttgatgccagcccctccagagaaaaggtcctgcagacggtattaagcctaatccagaatagttttagtgaaccgggtaccggc

SEQ ID NO: 1114 - protein, 200 aa, Homo sapiens
TGSIEGLDATGGKTTVTQSVADSLKAVLLKSPPSCIGQWRKIFDDEPTIIRRAFYSLGNYIVASEIAKESAKSPVIVDRYWHSTATYAIATEVSGGLQHLPPAHHPVYQWPEDLLKPDLILLLTVSPEERLQRLQGRGMEKTREEAELEANSVFRQKVEMSYQRMENPGCHVVDASPSREKVLQTVLSLIQNSFSEPGTG

SEQ ID NO: 1115 - DNA, 601 bp, Homo sapiens; identical to SEQ ID NO: 1113
  CDS (2)..(601)

SEQ ID NO: 1116 - protein, 200 aa, Homo sapiens; identical to SEQ ID NO: 1114

SEQ ID NO: 1117 - DNA, 2331 bp, Homo sapiens
  CDS (16)..(768)
gtctgcgctggggccatggctccgccgcgccgcttcgtcctggagcttcctgactgcaccctggctcacttcgccctaggcgccgttttggaggagtgtacctcctttattcctgaagcccgggcagtgcttgacctggtcgaccagtgcccaaaacagatccagaaaggaaagttccaggttgttgccatcgaaggactggatgccacgggtaaaaccacggtgacccagtcagcggcagattcacttaaggctgtcctcttaaagtcaccaccctcttgcattggccagtggaggaagatctttgatgatgaaccaactatcattagaagagctttttactctttgggcaattatattgtggcctccgaaatagctaaagaatctgccaaatctcctgtgattgtagacaggtactggcacagcacggccacctatgccatagccactgaggtgagtgggggtctccagcacctgcccccagcccatcaccctgtgtaccagtggccagaggacctgctcaaacctgaccttatcctgctgctcactgtgagtcctgaggagaggttgcagaggctgcagggccggggcatggagaagaccagggaagaagcagaacttgaggccaacagtgtgtttcgtcaaaaggtagaaatgtcctaccagcggatggagaatcctggctgccatgtggttgatgccagcccctccagagaaaaggtcctgcagacggtattaagcctaatccagaatagttttagtgaaccgtagttactctggccaggtgccacgtctaactagattagatgttgtttgaaacatctacatccaccatttgttatgcagtgttcccaaatttctgttctacaagcatgttgtgtggcagaaaactggagaccaggcatcttaagtttacttcagccatcgtaccctcttctgactgatggacccgtcatcacaaaggtccctctcatcatgttccagtgagaggccagcgattgctttcttcctggcatagtaaacattttcttggaacatatgtttcacttaatcactaccaaatatctggaagacctgtcttactcagacagcaccaggtgtacagaagcagcagacaagatcttccagatcagcagggagaccccggagcctctgcttctcctacactggcatgctgatgagatcgtgacatgcccacattggcttcttccacatctggttgcactcgtcatgatgggctcgctgcatctccctcagtcccaaattctagagccaagtgttcctgcagaggctgtctatgtgtcctggctgcccaaggacactcctgcagagccatttttgggtaaggaacacttacaaagaaggcattgatcttgtgtctgaggctcagagcccttttgataggcttctgagtcatatataaagacattcaagccaagatgctccaactgcaaatataccaaccttctctgaattatattttgcttatttatatttcttttctttttttctaaagtatggctctgaatagaatgcacattttccattgaactggatgcatttcatttagccaatccagtaatttatttatattaatctatacataatatgtttcctcagcataggagctatgattcattaattaaaagtggagtcaaaacgctaaatgcaatgtttgttgtgtattttcattacacaaacttaatttgtcttgttaaataagtacagtggatcttggagtgggatttcttggtaaattatcttgcacttgaatgtctcatgattacatatgaaatcgctttgacatatctttagacagaaaaaagtagctgagtgagggggaaattatagagctgtgtgactttagggagtaggttgaaccaggtgattacctaaaattccttccagttcaaaggcagataaatctgtaaattattttatcctatctaccatttcttaagaagacattactccaaaataattaaatttaaggctttatcaggtctgcatatagaatcttaaattctaataaagtttcatgttaatgtcataggatttttaaaagagctataggtaatttctgtataatatgtgtatattaaaatgtaattgatttcagttgaaagtattttaaagctgataaatagcattagggttctttgcaatgtggtatctagctgtattattggttttatttactttaaacattttgaaaagcttatactggcagcctagaaaaacaaacaattaatgtatctttatgtccctggcacatgaataaactttgctgtggtttactaaaaaaaaaaaaaaaaaaaaagggcggccgct

SEQ ID NO: 1118 - protein, 251 aa, Homo sapiens
MAPPRRFVLELPDCTLAHFALGAVLEECTSFIPEARAVLDLVDQCPKQIQKGKFQVVAIEGLDATGKTTVTQSAADSLKAVLLKSPPSCIGQWRKIFDDEPTIIRRAFYSLGNYIVASEIAKESAKSPVIVDRYWHSTATYAIATEVSGGLQHLPPAHHPVYQWPEDLLKPDLILLLTVSPEERLQRLQGRGMEKTREEAELEANSVFRQKVEMSYQRMENPGCHVVDASPSREKVLQTVLSLIQNSFSEP

SEQ ID NO: 1119 - DNA, 3117 bp, Homo sapiens
  CDS (21)..(3077)
cctccccagtagctgggactatgggagcgtgccaccatgcctggttaatttttgtatttttagtagagatggggtttcaccatgttggccaggcttgtcttcccctctccttagttatcctcctggattccaaagcctcccaggccgagctgggctggactgcactgccaagtaatgggtgggaggagatcagcggcgtggatgaacacgaccgtcccatccgcacgtaccaagtgtgcaatgtgctggagcccaaccaggacaactggctgcagactggctggataagccgtggccgcgggcagcgcatcttcgtggaactgcagttcacactccgtgactgcagcagcatccctggcgccgcgggtacctgcaaggagaccttcaacgtctactacctggaaactgaggccgacctgggccgtgggcgtccccgcctaggcggcaaaatcgacacgatcgcggcggacgagagcttcacgcagggcgacctgggtgagcgcaagatgaagctgaacacagaggtgcgcgagatcggaccgctcagccggcggggtttccacctggcctttcaggacgtgggcgcatgcgtggcgcttgtctcggtgcgcgtctactacaagcagtgccgcgccaccgtgcggggcctggccacgttcccagccaccgcagccgagagcgccttctccacactggtggaagtggccggaacgtgcgtggcgcactcggaaggggagcctggcagccccccacgcatgcactgcggcgccgacggcgagtggctggtgcctgtgggccgctgcagctgcagcgcgggattccaggagcgtggtgacttctgcgaaggtatctgtcccccagggttttacaaggtgtccccgcggcggcccctctgctcaccgtgcccagagcacagccgggccctggaaaacgcctccaccttctgcgtgtgccaggacagctatgcgcgctcacccaccgacccgccctcggcttcctgcacccgtccgccgtcggcgccgcgggacctgcagtacagcctgagccgctcgccgctggtgctgcgactgcgctggctgccgccggccgactcgggaggccgctcggacgtcacctactcgctgctgtgcctgcgctgcggccgcgagggcccggcgggcgcctgcgaggggccgcgcgtggccttcctaccgcgccaggcagggctgcgggagcgagccgccacgctgctgcacctgcggcccggcgcgcgctacaccgtgcgcgtggccgcgctcaacggcgtctcgggcccggcggccgccgcgggaaccacctacgcgcaggtcaccgtctccaccgggcccgggggtaaggccgtccgcgccccccaccccgaggccaccgcgcctgccgcccctgcgccctcttggggccgccccgtcggtcctgcgggatcagcgccctgggaggaggatgagatccgcagggaccgagtggaaccccagagcgtgtccctgtcgtggcgggagcccatccctgccggagcccctggggccaatgacacggagtacgagatccgatactacgagaaggtgagtgcgcagagtgagcagacttactccatggtgaagacaggggcgcccacagtcaccgtgattttcctcccagctgcctcagggtccagggaccagagccccgccattgtcgtcaccgtagtgaccatctcggccctcctcgtcctgggctccgtgatgagtgtgctggccatttggaggaggaggccctgcagctatggcaaaggaggaggggatgcccatgatgaagaggagctgtatttccactgtgagttggctgggaaagtcccaacacgtcgcacattcctggacccccagagctgtggggacctgctgcaggctgtgcatctgttcgccaaggaactggatgcgaaaagcgtcacgctggagaggagccttggaggaggcaagctgggcgggcggtttggggagctgtgctgtggctgcttgcagctccccggtcgccaggagctgctcgtagccgtgcacatgctgagggacagcgcctccgactcacagaggctcggcttcctggccgaggccctcacgctgggccagtttgaccatagccacatcgtgcggctggagggcgttgttacccgaggtaggggaagcaccttgatgattgtcaccgagtacatgagccatggggccctggacggcttcctcaggcagcggcacgaggggcagctggtggctgggcaactgatggggttgctgcctgggctggcatcagccatgaagtatctgtcagagatgggctacgttcaccggggcctggcagctcgccatgtgctggtcagcagcgaccttgtctgcaagatctctggcttcgggcggggcccccgggaccgatcagaggctgtctacaccactatggtgaggctacagagtggccggagcccagcgctatgggccgctcccgagacacttcagtttggccacttcagctctgccagtgacgtgtggagcttcggcatcatcatgtgggaggtgatggcctttggggagcggccttactgggacatgtctggccaagacgtggtgatcaaggctgtggaggatggcttccggctgccaccccccaggaactgtcctaaccttctgcaccgactaatgctcgactgctggcagaaggacccaggtgagcggcccaggttctcccagatccacagcatcctgagcaagatggtgcaggacccagagccccccaagtgtgccctgactacctgtcccaggcctctgacccgcaggcctcccactccactagccgaccgtgccttctccaccttcccctcctttggctctgtgggcgcgtggctggaggccctggacctgtgccgctacaaggacagcttcgcggctgctggctatgggagcctggaggccgtggccgagatgactagccaggacctggtgagcctaggcatctctttggctgaacatcgagaggccctcctcagcgggatcagcgccctgcaggcacgagtgctccagctgcagggccagggggtgcaggtgtgagtggaccccattcttccaaggcaggactccggtgggg

SEQ ID NO: 1120 - protein, 1019 aa, Homo sapiens
MGACHHAWLIFVFLVEMGFHHVGQACLPLSLVILLDSKASQAELGWTALPSNGWEEISGVDEHDRPIRTYQVCNVLEPNQDNWLQTGWISRGRGQRIFVELQFTLRDCSSIPGAAGTCKETFNVYYLETEADLGRGRPRLGGKIDTIAADESFTQGDLGERKMKLNTEVREIGPLSRRGFHLAFQDVGACVALVSVRVYYKQCRATVRGLATFPATAAESAFSTLVEVAGTCVAHSEGEPGSPPRMHCGADGEWLVPVGRCSCSAGFQERGDFCEGICPPGFYKVSPRRPLCSPCPEHSRALENASTFCVCQDSYARSPTDPPSASCTRPPSAPRDLQYSLSRSPLVLRLRWLPPADSGGRSDVTYSLLCLRCGREGPAGACEGPRVAFLPRQAGLRERAATLLHLRPGARYTVRVAALNGVSGPAAAAGTTYAQVTVSTGPGGKAVRAPHPEATAPAAPAPSWGRPVGPAGSAPWEEDEIRRDRVEPQSVSLSWREPIPAGAPGANDTEYEIRYYEKVSAQSEQTYSMVKTGAPTVTVIFLPAASGSRDQSPAIVVTVVTISALLVLGSVMSVLAIWRRRPCSYGKGGGDAHDEEELYFHCELAGKVPTRRTFLDPQSCGDLLQAVHLFAKELDAKSVTLERSLGGGKLGGRFGELCCGCLQLPGRQELLVAVHMLRDSASDSQRLGFLAEALTLGQFDHSHIVRLEGVVTRGRGSTLMIVTEYMSHGALDGFLRQRHEGQLVAGQLMGLLPGLASAMKYLSEMGYVHRGLAARHVLVSSDLVCKISGFGRGPRDRSEAVYTTMVRLQSGRSPALWAAPETLQFGHFSSASDVWSFGIIMWEVMAFGERPYWDMSGQDVVIKAVEDGFRLPPPRNCPNLLHRLMLDCWQKDPGERPRFSQIHSILSKMVQDPEPPKCALTTCPRPLTRRPPTPLADRAFSTFPSFGSVGAWLEALDLCRYKDSFAAAGYGSLEAVAEMTSQDLVSLGISLAEHREALLSGISALQARVLQLQGQGVQV

SEQ ID NO: 1121 - DNA, 547 bp, Homo sapiens
  CDS (2)..(547)
caccggatccgttatcctcctggattccaaagcctcccaggccgagctgggctggactgcactgccaagtaatgggtgggaggagatcagcggcgtggatgaacacgaccgtcccatccgcacgtaccaagtgtgcaatgtgctggagcccaaccaggacaactggctgcagactggctggataagccgtggccgcgggcagcgcatcttcgtggaactgcagttcacactccgtgactgcagcagcatccctggcgccgcgggtacctgcaaggagaccttcaacgtctactacctggaaactgaggccgacctgggccgtgggcgtccccgcctaggcggcagccggccccgcaaaatcgacacgatcgcggcggacgagagcttcacgcagggcgacctgggtgagcgcaagatgaagctgaacacagaggtgcgcgagatcggaccgctcagccggcggggtttccacctggcctttcaggacgtgggcgcatgcgtggcgcttgtctcggtgcgcgtctactacaagcagtgcgtcgacggc

SEQ ID NO: 1122 - protein, 182 aa, Homo sapiens
TGSVILLDSKASQAELGWTALPSNGWEEISGVDEHDRPIRTYQVCNVLEPNQDNWLQTGWISRGRGQRIFVELQFTLRDCSSIPGAAGTCKETFNVYYLETEADLGRGRPRLGGSRPRKIDTIAADESFTQGDLGERKMKLNTEVREIGPLSRRGFHLAFQDVGACVALVSVRVYYKQCVDG

SEQ ID NO: 1123 - DNA, 694 bp, Homo sapiens
  CDS (2)..(694)
caccggatccctcgtagccgtgcacatgctgagggacagcgcctccgactcacagaggctcggcttcctggccgaggccctcacgctgggccagtttgaccatagccacatcgtgcggctggagggcgttgttacccgaggaagcaccttgatgattgtcaccgagtacatgagccatggggccctggacggcttcctcaggcggcacgaggggcagctggtggctgggcaactgatggggttgctgcctgggctggcatcagccatgaagtatctgtcagagatgggctacgttcaccggggcctggcagctcgccatgtgctggtcagcagcgaccttgtctgcaagatctctggcttcgggcggggcccccgggaccgatcagaggctgtctacaccactatgagtggccggagcccagcgctatgggccgctcccgagacacttcagtttggccacttcagctctgccagtgacgtgtggagcttcggcatcatcatgtgggaggtgatggcctttggggagcggccttactgggacatgtctggccaagacgtgatcaaggctgtggaggatggcttccggctgccaccccccaggaactgtcctaaccttctgcaccgactaatgctcgactgctggcagaaggacccaggtgagcggcccaggttctcccagatccacgtcgacggc

SEQ ID NO: 1124 - protein, 231 aa, Homo sapiens
TGSLVAVHMLRDSASDSQRLGFLAEALTLGQFDHSHIVRLEGVVTRGSTLMIVTEYMSHGALDGFLRRHEGQLVAGQLMGLLPGLASAMKYLSEMGYVHRGLAARHVLVSSDLVCKISGFGRGPRDRSEAVYTTMSGRSPALWAAPETLQFGHFSSASDVWSFGIIMWEVMAFGERPYWDMSGQDVIKAVEDGFRLPPPRNCPNLLHRLMLDCWQKDPGERPRFSQIHVDG

SEQ ID NO: 1125 - DNA, 2131 bp, Homo sapiens
  CDS (93)..(2087)
ctaaatgaagagcgcttgggacctgaacaaccagcagcgatacccaggtacaaaggacctccagaccagagccagccagcagcaaaaagagcatggagctgaggagtacagcagcccccagagctgagggctacagcaacgtgggcttccagaatgaagaaaactttcttgagaacgagaacacatcaggaaacaactcaataagaagcagagctgtgcaaagcagggagcacacaaacaccaaacaggatgaagaacaggtcacagttgagcaggattctccaagaaacagagaacacatggaggatgatgatgaggagatgcaacaaaaagggtgtttggaaaggaggtatgacacagtatgtggtttctgtaggaaacacaaaacaactcttcggcacatcatctggggcattttattagcaggttatctggttatggtgatttcggcctgtgtgctgaactttcacagagcccttcctctttttgtgatcaccgtggctgccatcttctttgttgtctgggatcacctgatggccaaatacgaacatcgaattgatgagatgctgtctcctggcagaaggcttctaaacagccattggttctggctgaagtgggtgatctggagctccctggtcctagcagttattttctggttggcctttgacactgccaaattgggtcaacagcagctggtgtccttcggtgggctcataatgtacattgtcctgttatttctattttccaagtacccaaccagagtttactggagacctgtcttatggggaatcgggctacagtttcttcttgggctcttgattctaaggactgaccctggatttatagcttttgattggttgggcagactagttcaggtcctgccgatcgtggttttcttcagcactgtgatgtccatgctgtactaccctggactgatgcagtggattattagaaaggttggatggatcatgctagttactacgggatcatctcctattgaatctgtagttgcttctgggcatatatttgttggacaaacggagtctccactgctggtccgaccatatttaccttacatcaccaagtctgaactccacgccatcatgaccgccgggttctctaccattgctggaagcgtgctaggtgcatacatttcttttggggttccatcctcccacttgttaacagcgtcagttatgtcagcacctgcgtcattggctgctgctaaactcttttggcctgagacagaaaaacctaaaataaccctcaagaatgccatgaaaatggaaagtggtgattcagggaatcttctagaagctgcaacacagggagcatcctcctccatctccctggtggccaacatcgctgtgaatctgattgccttcctggccctgctgtcttttatgaattcagccctgtcctggtttggaaacatgtttgactacccacagctgagttttgagctaatctgctcctacatcttcatgcccttttccttcatgatgggagtggaatggcaggacagctttatggttgccagactcataggttataagaccttcttcaatgaatttgtggcttatgagcacctctcaaaatggatccacttgaggaaagaaggtggacccaaatttgtaaacggtgtgcagcaatatatatcaattcgttctgagataatcgccacttacgctctctgtggttttgccaatatcgggtccctaggaatcgtgatcggcggactcacatccatggctccttccagaaagcgtgatatcgcctcgggggcagtgagagctctgattgcggggaccgtggcctgcttcatgacagcctgcatcgcaggcatactctccagcactcctgtggacatcaactgccatcacgttttagagaatgccttcaactccactttccctggaaacacaaccaaggtgatagcttgttgccaaagtctgttgagcagcactgttgccaagggtcctggtgaagtcatcccaggaggaaaccacagtctgtattctttgaagggctgctgcacattgttgaatccatcgacctttaactgcaatgggatctctaatacattttgaggtcagccacttctccagtggaactctgaagtacagatgct

SEQ ID NO: 1126 - protein, 665 aa, Homo sapiens
MELRSTAAPRAEGYSNVGFQNEENFLENENTSGNNSIRSRAVQSREHTNTKQDEEQVTVEQDSPRNREHMEDDDEEMQQKGCLERRYDTVCGFCRKHKTTLRHIIWGILLAGYLVMVISACVLNFHRALPLFVITVAAIFFVVWDHLMAKYEHRIDEMLSPGRRLLNSHWFWLKWVIWSSLVLAVIFWLAFDTAKLGQQQLVSFGGLIMYIVLLFLFSKYPTRVYWRPVLWGIGLQFLLGLLILRTDPGFIAFDWLGRLVQVLPIVVFFSTVMSMLYYPGLMQWIIRKVGWIMLVTTGSSPIESVVASGHIFVGQTESPLLVRPYLPYITKSELHAIMTAGFSTIAGSVLGAYISFGVPSSHLLTASVMSAPASLAAAKLFWPETEKPKITLKNAMKMESGDSGNLLEAATQGASSSISLVANIAVNLIAFLALLSFMNSALSWFGNMFDYPQLSFELICSYIFMPFSFMMGVEWQDSFMVARLIGYKTFFNEFVAYEHLSKWIHLRKEGGPKFVNGVQQYISIRSEIIATYALCGFANIGSLGIVIGGLTSMAPSRKRDIASGAVRALIAGTVACFMTACIAGILSSTPVDINCHHVLENAFNSTFPGNTTKVIACCQSLLSSTVAKGPGEVIPGGNHSLYSLKGCCTLLNPSTFNCNGISNTF

SEQ ID NO: 1127 - DNA, 1258 bp, Homo sapiens
  CDS (83)..(1159)
tgttacctggagaccctctgagctctcacctgctacttctgccgctgcttctgcacagagcccgggcgaggacccctccaggatgcaggtcccgaacagcaccggcccggacaacgcgacgctgcagatgctgcggaacccggcgatcgcggtggccctgcccgtggtgtactcgctggtggcggcggtcagcatcccgggcaacctcttctctctgtgggtgctgtgccggcgcatggggcccagatccccgtcggtcatcttcatgatcaacctgagcgtcacggacctgatgctggccagcgtgttgcctttccaaatctactaccattgcaaccgccaccactgggtattcggggtgctgctttgcaacgtggtgaccgtggccttttacgcaaacatgtattccagcatcctcaccatgacctgtatcagcgtggagcgcttcctgggggtcctgtacccgctcagctccaagcgctggcgccgccgtcgttacgcggtggccgcgtgtgcagggacctggctgctgctcctgaccgccctgtccccgctggcgcgcaccgatctcacctacccggtgcacgccctgggcatcatcacctgcttcgacgtcctcaagtggacgatgctccccagcgtggccatgtgggccgtgttcctcttcaccatcttcatcctgctgttcctcatcccgttcgtgatcaccgtggcttgttacacggccaccatcctcaagctgttgcgcacggaggaggcgcacggccgggagcagcggaggcgcgcggtgggcctggccgcggtggtcttgctggcctttgtcacctgcttcgcccccaacaacttcgtgctcctggcgcacatcgtgagccgcctgttctacggcaagagctactaccacgtgtacaaagtcacgctgtgtctcagctgcctcaacaactgtctggacccgtttgtttattactttgcgtcccgggaattccagctgcgcctgcgggaatatttgggctgccgccgggtgcccagagacaccctggacacgcgccgcgagagcctcttctccgccaggaccacgtccgtgcgctccgaggccggtgcgcaccctgaagggatggagggagccaccaggcccggcctccagaggcaggagagtgtgttctgagtcccgggggcgcagcttggagagccgggggcgcagcttggagatccaggggcgcatggagaggccacggtgccagaggttcagggagaacagctg

SEQ ID NO: 1128 - protein, 359 aa, Homo sapiens
MQVPNSTGPDNATLQMLRNPAIAVALPVVYSLVAAVSIPGNLFSLWVLCRRMGPRSPSVIFMINLSVTDLMLASVLPFQIYYHCNRHHWVFGVLLCNVVTVAFYANMYSSILTMTCISVERFLGVLYPLSSKRWRRRRYAVAACAGTWLLLLTALSPLARTDLTYPVHALGIITCFDVLKWTMLPSVAMWAVFLFTIFILLFLIPFVITVACYTATILKLLRTEEAHGREQRRRAVGLAAVVLLAFVTCFAPNNFVLLAHIVSRLFYGKSYYHVYKVTLCLSCLNNCLDPFVYYFASREFQLRLREYLGCRRVPRDTLDTRRESLFSARTTSVRSEAGAHPEGMEGATRPGLQRQESVF

SEQ ID NO: 1129 - DNA, 1258 bp, Homo sapiens
  CDS (83)..(1159)
tgttacctggagaccctctgagctctcacctgctacttctgccgctgcttctgcacagagcccgggcgaggacccctccaggatgcaggtcccgaacagcaccggcccggacaacgcgacgctgcagatgctgcggaacccggcgatcgcggtggccctgcccgtggtgtactcgctggtggcggcggtcagcatcccgggcaacctcttctctctgtgggtgctgtgccggcgcatggggcccagatccccgtcggtcatcttcatgatcaacctgagcgtcacggacctgatgctggccagcgtgttgcctttccaaatctactaccattgcaaccgccaccactgggtattcggggtgctgctttgcaacgtggtgaccgtggccttttacgcaaacatgtattccagcatcctcaccatgacctgtatcagcgtggagcgcttcctgggggtcctgtacccgctcagctccaagcgctggcgccgccgtcgttacgcggtggccgcgtgtgcagggacctggctgctgctcctgaccgccctgtccccgctggcgcgcaccgatctcacctacccggtgcacgccctgggcatcatcacctgcttcgacgtcctcaagtggacgatgctccccagcgtggccatgtgggccgtgttcctcttcaccatcttcatcctgctgttcctcatcccgttcgtgatcaccgtggcttgttacacggccaccatcctcaagctgttgcgcacggaggaggcgcacggccgggagcagcggaggcgcgcggtgggcctggccgcggtggtcttgctggcctttgtcacctgcttcgcccccaacaacttcgtgctcctggcgcacatcgtgagccgcctgttctacggcaagagctactaccacgtgtacaaggtcacgctgtgtctcagctgcctcaacaactgtctggacccgtttgtttattactttgcgtcccgggaattccagctgcgcctgcgggaatatttgggctgccgccgggtgcccagagacaccctggacacgcgccgcgagagcctcttctccgccaggaccacgtccgtgcgctccgaggccggtgcgcaccctgaagggatggagggagccaccaggcccggcctccagaggcaggagagtgtgttctgagtcccgggggcgcagcttggagagccgggggcgcagcttggagatccaggggcgcatggagaggccacggtgccagaggttcagggagaacagctg

SEQ ID NO: 1130 - protein, 359 aa, Homo sapiens; identical to SEQ ID NO: 1128

SEQ ID NO: 1131 - DNA, 1258 bp, Homo sapiens
  CDS (83)..(1159)
tgttacctggagaccctctgagctctcacctgctacttctgccgctgcttctgcacagagcccgggcgaggacccctccaggatgcaggtcccgaacagcaccggcccggacaacgcgacgctgcagatgctgcggaacccggcgatcgcggtggccctgcccgtggtgtactcgctggtggcggcggtcagcatcccgggcaacctcttctctctgtgggtgctgtgccggcgcatggggcccagatccccgtcggtcatcttcatgatcaacctgagcgtcacggacctgatgctggccagcgtgttgcctttccaaatctactaccattgcaaccgccaccactgggtattcggggtgctgctttgcaacgtggtgaccgtggccttttacgcaaacatgtattccagcatcctcaccatgacctgtatcagcgtggagcgcttcctgggggtcctgtacccgctcagctccaagcgctggcgccgccgtcgttacgcggtggccgcgtgtgcagggacctggctgctgctcctgaccgccctgtccccgctggcgcgcaccgatctcacctacccggtgcacgccctgggcatcatcacctgcttcgacgtcctcaagtggacgatgctccccagcgtggccatgtgggccgtgttcctcttcaccatcttcatcctgctgttcctcatcccgttcgtgatcaccgtggcttgttacacggccaccatcctcaagctgttgcgcacggaggaggcgcacggccgggagcagcggaggcgcgcggtgggcctggccgcggtggtcttgctggcctttgtcacctgcttcgcccccaacaacttcgtgctcctggcgcacatcgtgagccgcctgttctacggcaagagctactaccacgtgtacaaactcacgctgtgtctcagctgcctcaacaactgtctggacccgtttgtttattactttgcgtcccgggaattccagctgcgcctgcgggaatatttgggctgccgccgggtgcccagagacaccctggacacgcgccgcgagagcctcttctccgccaggaccacgtccgtgcgctccgaggccggtgcgcaccctgaagggatggagggagccaccaggcccggcctccagaggcaggagagtgtgttctgagtcccgggggcgcagcttggagagccgggggcgcagcttggagatccaggggcgcatggagaggccacggtgccagaggttcagggagaacagctg

SEQ ID NO: 1132 - protein, 359 aa, Homo sapiens
MQVPNSTGPDNATLQMLRNPAIAVALPVVYSLVAAVSIPGNLFSLWVLCRRMGPRSPSVIFMINLSVTDLMLASVLPFQIYYHCNRHHWVFGVLLCNVVTVAFYANMYSSILTMTCISVERFLGVLYPLSSKRWRRRRYAVAACAGTWLLLLTALSPLARTDLTYPVHALGIITCFDVLKWTMLPSVAMWAVFLFTIFILLFLIPFVITVACYTATILKLLRTEEAHGREQRRRAVGLAAVVLLAFVTCFAPNNFVLLAHIVSRLFYGKSYYHVYKLTLCLSCLNNCLDPFVYYFASREFQLRLREYLGCRRVPRDTLDTRRESLFSARTTSVRSEAGAHPEGMEGATRPGLQRQESVF

SEQ ID NO: 1133 - DNA, 21 bp, Artificial Sequence
  Description of Artifical Sequence:  Primer/Probe
ggtggtgagcgtgtacatgtg

SEQ ID NO: 1134 - DNA, 25 bp, Artificial Sequence
  Description of Artifical Sequence:  Primer/Probe
cagcgacctgctcttcaccctctcg

SEQ ID NO: 1135 - DNA, 20 bp, Artificial Sequence
  Description of Artifical Sequence:  Primer/Probe
gtaggagagacgaacgggca

SEQ ID NO: 1136 - DNA, 22 bp, Artificial Sequence
  Description of Artifical Sequence:  Primer/Probe
aggacagttcgaatccctatgt

SEQ ID NO: 1137 - DNA, 26 bp, Artificial Sequence
  Description of Artifical Sequence:  Primer/Probe
ccagtttgaaatccttggcactacct

SEQ ID NO: 1138 - DNA, 21 bp, Artificial Sequence
  Description of Artifical Sequence:  Primer/Probe
gcatgtctttgccaaaagtct

SEQ ID NO: 1139 - DNA, 22 bp, Artificial Sequence
  Description of Artifical Sequence:  Primer/Probe
gttttcattgcattgcatttct

SEQ ID NO: 1140 - DNA, 29 bp, Artificial Sequence
  Description of Artifical Sequence:  Primer/Probe
cattcctaagaccctttagttgaccttca

SEQ ID NO: 1141 - DNA, 22 bp, Artificial Sequence
  Description of Artifical Sequence:  Primer/Probe
atcttggagctgcagaatagct

SEQ ID NO: 1142 - DNA, 22 bp, Artificial Sequence
  Description of Artifical Sequence:  Primer/Probe
ctcactcaccacaagggagtaa

SEQ ID NO: 1143 - DNA, 27 bp, Artificial Sequence
  Description of Artifical Sequence:  Primer/Probe
tgacatcaaactcaacagttcccagga

SEQ ID NO: 1144 - DNA, 22 bp, Artificial Sequence
  Description of Artifical Sequence:  Primer/Probe
gtctaggagagagctgagcaaa

SEQ ID NO: 1145 - DNA, 22 bp, Artificial Sequence
  Description of Artifical Sequence:  Primer/Probe
ctgggagagacatacgactttg

SEQ ID NO: 1146 - DNA, 25 bp, Artificial Sequence
  Description of Artifical Sequence:  Primer/Probe
cccggaacaccttctcaagaggagt

SEQ ID NO: 1147 - DNA, 22 bp, Artificial Sequence
  Description of Artifical Sequence:  Primer/Probe
gggaaggatggtgtctaagaaa

SEQ ID NO: 1148 - DNA, 22 bp, Artificial Sequence
  Description of Artifical Sequence:  Primer/Probe
gaggctctctccagtaacatca

SEQ ID NO: 1149 - DNA, 26 bp, Artificial Sequence
  Description of Artifical Sequence:  Primer/Probe
actctccttgtcctctgaggcgctct

SEQ ID NO: 1150 - DNA, 22 bp, Artificial Sequence
  Description of Artifical Sequence:  Primer/Probe
gcagtttggttgtttggtttac

SEQ ID NO: 1151 - DNA, 21 bp, Artificial Sequence
  Description of Artifical Sequence:  Primer/Probe
agcctacgctgaagagttagc

SEQ ID NO: 1152 - DNA, 26 bp, Artificial Sequence
  Description of Artifical Sequence:  Primer/Probe
aagccgaggtctcaatataatcctga

SEQ ID NO: 1153 - DNA, 20 bp, Artificial Sequence
  Description of Artifical Sequence:  Primer/Probe
acctgcaacttctcctcgtt

SEQ ID NO: 1154 - DNA, 22 bp, Artificial Sequence
  Description of Artifical Sequence:  Primer/Probe
gacgttggcatcttggtaaata

SEQ ID NO: 1155 - DNA, 26 bp, Artificial Sequence
  Description of Artifical Sequence:  Primer/Probe
cgcagtatttcactcagctgtccgag

SEQ ID NO: 1156 - DNA, 22 bp, Artificial Sequence
  Description of Artifical Sequence:  Primer/Probe
ttatgatgtcccagagcttgtc

SEQ ID NO: 1157 - DNA, 22 bp, Artificial Sequence
  Description of Artifical Sequence:  Primer/Probe
atcttctttggcaattttgtga

SEQ ID NO: 1158 - DNA, 25 bp, Artificial Sequence
  Description of Artifical Sequence:  Primer/Probe
aatgcctccgtcatcctgatttcct

SEQ ID NO: 1159 - DNA, 22 bp, Artificial Sequence
  Description of Artifical Sequence:  Primer/Probe
atggtcttgatgatgagcagat

SEQ ID NO: 1160 - DNA, 22 bp, Artificial Sequence
  Description of Artifical Sequence:  Primer/Probe
ggaatgtggggatgattatgtt

SEQ ID NO: 1161 - DNA, 29 bp, Artificial Sequence
  Description of Artifical Sequence:  Primer/Probe
tccaagtagatgtcaaactctacacccca

SEQ ID NO: 1162 - DNA, 22 bp, Artificial Sequence
  Description of Artifical Sequence:  Primer/Probe
gaggtggctcaggaagaagtac

SEQ ID NO: 1163 - DNA, 22 bp, Artificial Sequence
  Description of Artifical Sequence:  Primer/Probe
agagacaatccaaagccttttc

SEQ ID NO: 1164 - DNA, 26 bp, Artificial Sequence
  Description of Artifical Sequence:  Primer/Probe
caactgtgtgcctcacctcattgttg

SEQ ID NO: 1165 - DNA, 22 bp, Artificial Sequence
  Description of Artifical Sequence:  Primer/Probe
agaccctggctttaaataagca

SEQ ID NO: 1166 - DNA, 22 bp, Artificial Sequence
  Description of Artifical Sequence:  Primer/Probe
tcagcaatctccaattgagatt

SEQ ID NO: 1167 - DNA, 26 bp, Artificial Sequence
  Description of Artifical Sequence:  Primer/Probe
tgaaatatgactcttccctccgacca

SEQ ID NO: 1168 - DNA, 22 bp, Artificial Sequence
  Description of Artifical Sequence:  Primer/Probe
ttttagctgagcttgggtcata

SEQ ID NO: 1169 - DNA, 22 bp, Artificial Sequence
  Description of Artifical Sequence:  Primer/Probe
tcagcaatctccaattgagatt

SEQ ID NO: 1170 - DNA, 26 bp, Artificial Sequence
  Description of Artifical Sequence:  Primer/Probe
tgaaatatgactcttccctccgacca

SEQ ID NO: 1171 - DNA, 22 bp, Artificial Sequence
  Description of Artifical Sequence:  Primer/Probe
ttttagctgagcttgggtcata

SEQ ID NO: 1172 - DNA, 20 bp, Artificial Sequence
  Description of Artifical Sequence:  Primer/Probe
ggctcctgctgaccatattc

SEQ ID NO: 1173 - DNA, 26 bp, Artificial Sequence
  Description of Artifical Sequence:  Primer/Probe
catttaccctccaccatttctcccag

SEQ ID NO: 1174 - DNA, 20 bp, Artificial Sequence
  Description of Artifical Sequence:  Primer/Probe
gctgggctcatgagagttct

SEQ ID NO: 1175 - DNA, 22 bp, Artificial Sequence
  Description of Artifical Sequence:  Primer/Probe
gaagtgaaagaatgtgcatggt

SEQ ID NO: 1176 - DNA, 27 bp, Artificial Sequence
  Description of Artifical Sequence:  Primer/Probe
caccagtgcattctggatctcttatca

SEQ ID NO: 1177 - DNA, 22 bp, Artificial Sequence
  Description of Artifical Sequence:  Primer/Probe
tgggctgattacttcccttatt

SEQ ID NO: 1178 - DNA, 21 bp, Artificial Sequence
  Description of Artifical Sequence:  Primer/Probe
agatgagtcagtgccgttagc

SEQ ID NO: 1179 - DNA, 29 bp, Artificial Sequence
  Description of Artifical Sequence:  Primer/Probe
cctccacaaaatttgactttaatcaactg

SEQ ID NO: 1180 - DNA, 22 bp, Artificial Sequence
  Description of Artifical Sequence:  Primer/Probe
tccatttcagccatacaaagtc

SEQ ID NO: 1181 - DNA, 17 bp, Artificial Sequence
  Description of Artifical Sequence:  Primer/Probe
gagacggatggccacag

SEQ ID NO: 1182 - DNA, 29 bp, Artificial Sequence
  Description of Artifical Sequence:  Primer/Probe
ccaggtggctcagagcagcaggaatgtac

SEQ ID NO: 1183 - DNA, 16 bp, Artificial Sequence
  Description of Artifical Sequence:  Primer/Probe
cgttccgcctgcagag

SEQ ID NO: 1184 - DNA, 21 bp, Artificial Sequence
  Description of Artifical Sequence:  Primer/Probe
tgtagaatttcccacggaaag

SEQ ID NO: 1185 - DNA, 26 bp, Artificial Sequence
  Description of Artifical Sequence:  Primer/Probe
cactgcacttctctgaagtcctggga

SEQ ID NO: 1186 - DNA, 19 bp, Artificial Sequence
  Description of Artifical Sequence:  Primer/Probe
ctgcaacacggatgactgt

SEQ ID NO: 1187 - DNA, 22 bp, Artificial Sequence
  Description of Artifical Sequence:  Primer/Probe
tgggaaattctacaagtggaaa

SEQ ID NO: 1188 - DNA, 23 bp, Artificial Sequence
  Description of Artifical Sequence:  Primer/Probe
ctcgctcacgagcctagcggaag

SEQ ID NO: 1189 - DNA, 22 bp, Artificial Sequence
  Description of Artifical Sequence:  Primer/Probe
cctctccgtgtagaagttgaag

SEQ ID NO: 1190 - DNA, 22 bp, Artificial Sequence
  Description of Artifical Sequence:  Primer/Probe
aacgagaagctgaaggtgaact

SEQ ID NO: 1191 - DNA, 26 bp, Artificial Sequence
  Description of Artifical Sequence:  Primer/Probe
accccagagttcctgtcacctgaggt

SEQ ID NO: 1192 - DNA, 22 bp, Artificial Sequence
  Description of Artifical Sequence:  Primer/Probe
tcggagatttggtcataattca

SEQ ID NO: 1193 - DNA, 22 bp, Artificial Sequence
  Description of Artifical Sequence:  Primer/Probe
aacgagaagctgaaggtgaact

SEQ ID NO: 1194 - DNA, 26 bp, Artificial Sequence
  Description of Artifical Sequence:  Primer/Probe
accccagagttcctgtcacctgaggt

SEQ ID NO: 1195 - DNA, 22 bp, Artificial Sequence
  Description of Artifical Sequence:  Primer/Probe
tcggagatttggtcataattca

SEQ ID NO: 1196 - DNA, 22 bp, Artificial Sequence
  Description of Artifical Sequence:  Primer/Probe
agaagaacaccccagggatata

SEQ ID NO: 1197 - DNA, 26 bp, Artificial Sequence
  Description of Artifical Sequence:  Primer/Probe
cctcgttggtgaactacaacctctgg

SEQ ID NO: 1198 - DNA, 22 bp, Artificial Sequence
  Description of Artifical Sequence:  Primer/Probe
cctctagctgggtcactttctc

SEQ ID NO: 1199 - DNA, 20 bp, Artificial Sequence
  Description of Artifical Sequence:  Primer/Probe
ctctgggactcccgagactg

SEQ ID NO: 1200 - DNA, 32 bp, Artificial Sequence
  Description of Artifical Sequence:  Primer/Probe
cccataggtttctgtttgacagaagtcctcct

SEQ ID NO: 1201 - DNA, 20 bp, Artificial Sequence
  Description of Artifical Sequence:  Primer/Probe
aggcccttcaatgcagagaa

SEQ ID NO: 1202 - DNA, 18 bp, Artificial Sequence
  Description of Artifical Sequence:  Primer/Probe
gccgctcccgagacactt

SEQ ID NO: 1203 - DNA, 25 bp, Artificial Sequence
  Description of Artifical Sequence:  Primer/Probe
ccacttcagctctgccagtgacgtg

SEQ ID NO: 1204 - DNA, 19 bp, Artificial Sequence
  Description of Artifical Sequence:  Primer/Probe
cccacatgatgatgccgaa

SEQ ID NO: 1205 - DNA, 22 bp, Artificial Sequence
  Description of Artifical Sequence:  Primer/Probe
cctagagatcctcatcctcgat

SEQ ID NO: 1206 - DNA, 25 bp, Artificial Sequence
  Description of Artifical Sequence:  Primer/Probe
aatgacaatgcaccccagttcctgt

SEQ ID NO: 1207 - DNA, 22 bp, Artificial Sequence
  Description of Artifical Sequence:  Primer/Probe
aaagatggaaccctggtagaaa

SEQ ID NO: 1208 - DNA, 22 bp, Artificial Sequence
  Description of Artifical Sequence:  Primer/Probe
cctagagatcctcatcctcgat

SEQ ID NO: 1209 - DNA, 25 bp, Artificial Sequence
  Description of Artifical Sequence:  Primer/Probe
aatgacaatgcaccccagttcctgt

SEQ ID NO: 1210 - DNA, 22 bp, Artificial Sequence
  Description of Artifical Sequence:  Primer/Probe
aaagatggaaccctggtagaaa

SEQ ID NO: 1211 - DNA, 22 bp, Artificial Sequence
  Description of Artifical Sequence:  Primer/Probe
ggtatgtgcctgccctattatt

SEQ ID NO: 1212 - DNA, 30 bp, Artificial Sequence
  Description of Artifical Sequence:  Primer/Probe
ccaccagtatcattaaggatcttttacctg

SEQ ID NO: 1213 - DNA, 22 bp, Artificial Sequence
  Description of Artifical Sequence:  Primer/Probe
gccattctgtttgcaattatgt

SEQ ID NO: 1214 - DNA, 22 bp, Artificial Sequence
  Description of Artifical Sequence:  Primer/Probe
aagctctcctgtgcagatacct

SEQ ID NO: 1215 - DNA, 23 bp, Artificial Sequence
  Description of Artifical Sequence:  Primer/Probe
ctacgagatggcgctgtccacct

SEQ ID NO: 1216 - DNA, 22 bp, Artificial Sequence
  Description of Artifical Sequence:  Primer/Probe
aaagagggagcattaggatcag

SEQ ID NO: 1217 - DNA, 22 bp, Artificial Sequence
  Description of Artifical Sequence:  Primer/Probe
aagctctcctgtgcagatacct

SEQ ID NO: 1218 - DNA, 23 bp, Artificial Sequence
  Description of Artifical Sequence:  Primer/Probe
ctacgagatggcgctgtccacct

SEQ ID NO: 1219 - DNA, 22 bp, Artificial Sequence
  Description of Artifical Sequence:  Primer/Probe
aaagagggagcattaggatcag

SEQ ID NO: 1220 - DNA, 23 bp, Artificial Sequence
  Description of Artifical Sequence:  Primer/Probe
gggaaaccttcttattgtggtca

SEQ ID NO: 1221 - DNA, 22 bp, Artificial Sequence
  Description of Artifical Sequence:  Primer/Probe
tgacctccgacccacacctgca

SEQ ID NO: 1222 - DNA, 24 bp, Artificial Sequence
  Description of Artifical Sequence:  Primer/Probe
gattgcccaagagaaaatacatgg

SEQ ID NO: 1223 - DNA, 21 bp, Artificial Sequence
  Description of Artifical Sequence:  Primer/Probe
tgtgtccgattagtggccttc

SEQ ID NO: 1224 - DNA, 31 bp, Artificial Sequence
  Description of Artifical Sequence:  Primer/Probe
catcagtatggatagaaaaccacctgccctg

SEQ ID NO: 1225 - DNA, 20 bp, Artificial Sequence
  Description of Artifical Sequence:  Primer/Probe
ctcgggacataagcactgca

SEQ ID NO: 1226 - DNA, 22 bp, Artificial Sequence
  Description of Artifical Sequence:  Primer/Probe
agaacaaggtggtgtctgtgtt

SEQ ID NO: 1227 - DNA, 26 bp, Artificial Sequence
  Description of Artifical Sequence:  Primer/Probe
ctacaccgtggtgattcccatgttga

SEQ ID NO: 1228 - DNA, 22 bp, Artificial Sequence
  Description of Artifical Sequence:  Primer/Probe
cttgttcctgaggctgtagatc

SEQ ID NO: 1229 - DNA, 22 bp, Artificial Sequence
  Description of Artifical Sequence:  Primer/Probe
tgtgcatcatcgtcactgtatt

SEQ ID NO: 1230 - DNA, 27 bp, Artificial Sequence
  Description of Artifical Sequence:  Primer/Probe
tctttgcgacttgaacactatccagca

SEQ ID NO: 1231 - DNA, 22 bp, Artificial Sequence
  Description of Artifical Sequence:  Primer/Probe
ggagaccactggtgagatatca

SEQ ID NO: 1232 - DNA, 19 bp, Artificial Sequence
  Description of Artifical Sequence:  Primer/Probe
tgctcctcccacctcactg

SEQ ID NO: 1233 - DNA, 34 bp, Artificial Sequence
  Description of Artifical Sequence:  Primer/Probe
tgtccatacactatggatttgcttgctttgtcta

SEQ ID NO: 1234 - DNA, 19 bp, Artificial Sequence
  Description of Artifical Sequence:  Primer/Probe
tgctgttcttgggcctcaa

SEQ ID NO: 1235 - DNA, 27 bp, Artificial Sequence
  Description of Artifical Sequence:  Primer/Probe
atctacctggtaaccatatctggtaat

SEQ ID NO: 1236 - DNA, 28 bp, Artificial Sequence
  Description of Artifical Sequence:  Primer/Probe
ttcttatcagaatttcttctcagctcca

SEQ ID NO: 1237 - DNA, 25 bp, Artificial Sequence
  Description of Artifical Sequence:  Primer/Probe
gctcagaaagaaatacataggatga

SEQ ID NO: 1238 - DNA, 22 bp, Artificial Sequence
  Description of Artifical Sequence:  Primer/Probe
atgctctccggttaaacttctc

SEQ ID NO: 1239 - DNA, 30 bp, Artificial Sequence
  Description of Artifical Sequence:  Primer/Probe
tggacctaatgtaatcaaccacttcttttg

SEQ ID NO: 1240 - DNA, 22 bp, Artificial Sequence
  Description of Artifical Sequence:  Primer/Probe
agagccagacacagagatgaga

SEQ ID NO: 1241 - DNA, 21 bp, Artificial Sequence
  Description of Artifical Sequence:  Primer/Probe
aggagcaacgtcctctgtaac

SEQ ID NO: 1242 - DNA, 26 bp, Artificial Sequence
  Description of Artifical Sequence:  Primer/Probe
cttccaaccacactgagcggtttgag

SEQ ID NO: 1243 - DNA, 20 bp, Artificial Sequence
  Description of Artifical Sequence:  Primer/Probe
agcatgtcgtccttgatgag

SEQ ID NO: 1244 - DNA, 21 bp, Artificial Sequence
  Description of Artifical Sequence:  Primer/Probe
aggagcaacgtcctctgtaac

SEQ ID NO: 1245 - DNA, 26 bp, Artificial Sequence
  Description of Artifical Sequence:  Primer/Probe
cttccaaccacactgagcggtttgag

SEQ ID NO: 1246 - DNA, 20 bp, Artificial Sequence
  Description of Artifical Sequence:  Primer/Probe
agcatgtcgtccttgatgag

SEQ ID NO: 1247 - DNA, 21 bp, Artificial Sequence
  Description of Artifical Sequence:  Primer/Probe
aggagcaacgtcctctgtaac

SEQ ID NO: 1248 - DNA, 26 bp, Artificial Sequence
  Description of Artifical Sequence:  Primer/Probe
cttccaaccacactgagcggtttgag

SEQ ID NO: 1249 - DNA, 20 bp, Artificial Sequence
  Description of Artifical Sequence:  Primer/Probe
agcatgtcgtccttgatgag

SEQ ID NO: 1250 - DNA, 21 bp, Artificial Sequence
  Description of Artifical Sequence:  Primer/Probe
aggagcaacgtcctctgtaac

SEQ ID NO: 1251 - DNA, 26 bp, Artificial Sequence
  Description of Artifical Sequence:  Primer/Probe
cttccaaccacactgagcggtttgag

SEQ ID NO: 1252 - DNA, 20 bp, Artificial Sequence
  Description of Artifical Sequence:  Primer/Probe
agcatgtcgtccttgatgag

SEQ ID NO: 1253 - DNA, 21 bp, Artificial Sequence
  Description of Artifical Sequence:  Primer/Probe
aggagcaacgtcctctgtaac

SEQ ID NO: 1254 - DNA, 26 bp, Artificial Sequence
  Description of Artifical Sequence:  Primer/Probe
cttccaaccacactgagcggtttgag

SEQ ID NO: 1255 - DNA, 20 bp, Artificial Sequence
  Description of Artifical Sequence:  Primer/Probe
acagcatgtcgtccttgatg

SEQ ID NO: 1256 - DNA, 20 bp, Artificial Sequence
  Description of Artifical Sequence:  Primer/Probe
caggagcaacgtcctctgta

SEQ ID NO: 1257 - DNA, 26 bp, Artificial Sequence
  Description of Artifical Sequence:  Primer/Probe
cttccaaccacactgagcggtttgag

SEQ ID NO: 1258 - DNA, 19 bp, Artificial Sequence
  Description of Artifical Sequence:  Primer/Probe
cacacagcatgtcgtcctt

SEQ ID NO: 1259 - DNA, 20 bp, Artificial Sequence
  Description of Artifical Sequence:  Primer/Probe
gacggtgaaggtcaggagca

SEQ ID NO: 1260 - DNA, 19 bp, Artificial Sequence
  Description of Artifical Sequence:  Primer/Probe
cctgtcgccgccgctttcc

SEQ ID NO: 1261 - DNA, 19 bp, Artificial Sequence
  Description of Artifical Sequence:  Primer/Probe
aaccgctcagtgtggttgg

SEQ ID NO: 1262 - DNA, 20 bp, Artificial Sequence
  Description of Artifical Sequence:  Primer/Probe
cctggtagggaggagttgga

SEQ ID NO: 1263 - DNA, 29 bp, Artificial Sequence
  Description of Artifical Sequence:  Primer/Probe
ctgaggctctatgaggacgaccagcggac

SEQ ID NO: 1264 - DNA, 19 bp, Artificial Sequence
  Description of Artifical Sequence:  Primer/Probe
ccaggcccagcaggtcttc

SEQ ID NO: 1265 - DNA, 17 bp, Artificial Sequence
  Description of Artifical Sequence:  Primer/Probe
gagacggatggccacag

SEQ ID NO: 1266 - DNA, 29 bp, Artificial Sequence
  Description of Artifical Sequence:  Primer/Probe
ccaggtggctcagagcagcaggaatgtac

SEQ ID NO: 1267 - DNA, 16 bp, Artificial Sequence
  Description of Artifical Sequence:  Primer/Probe
cgttccgcctgcagag

SEQ ID NO: 1268 - DNA, 17 bp, Artificial Sequence
  Description of Artifical Sequence:  Primer/Probe
gtgagctggtgggcatc

SEQ ID NO: 1269 - DNA, 23 bp, Artificial Sequence
  Description of Artifical Sequence:  Primer/Probe
ctccctaccaggggtgcctcctg

SEQ ID NO: 1270 - DNA, 18 bp, Artificial Sequence
  Description of Artifical Sequence:  Primer/Probe
cactctaaacgcgcaagc

SEQ ID NO: 1271 - DNA, 23 bp, Artificial Sequence
  Description of Artifical Sequence:  Primer/Probe
agtcacttcacctgcaagatcct

SEQ ID NO: 1272 - DNA, 22 bp, Artificial Sequence
  Description of Artifical Sequence:  Primer/Probe
ccgcatgccagcttcagcactg

SEQ ID NO: 1273 - DNA, 19 bp, Artificial Sequence
  Description of Artifical Sequence:  Primer/Probe
cttcgctgaccgacgtgtt

SEQ ID NO: 1274 - DNA, 22 bp, Artificial Sequence
  Description of Artifical Sequence:  Primer/Probe
gggaaatgggttgtccatatat

SEQ ID NO: 1275 - DNA, 26 bp, Artificial Sequence
  Description of Artifical Sequence:  Primer/Probe
tcctgcagccttataagaagtccaca

SEQ ID NO: 1276 - DNA, 22 bp, Artificial Sequence
  Description of Artifical Sequence:  Primer/Probe
atctgaaatggccagatttagc

SEQ ID NO: 1277 - DNA, 20 bp, Artificial Sequence
  Description of Artifical Sequence:  Primer/Probe
ggaccccattcgactactgt

SEQ ID NO: 1278 - DNA, 23 bp, Artificial Sequence
  Description of Artifical Sequence:  Primer/Probe
ctgatgaccagccgccatcaatc

SEQ ID NO: 1279 - DNA, 20 bp, Artificial Sequence
  Description of Artifical Sequence:  Primer/Probe
ttctcaaactgcacctggtc

SEQ ID NO: 1280 - DNA, 20 bp, Artificial Sequence
  Description of Artifical Sequence:  Primer/Probe
tctggacgacaactattgcc

SEQ ID NO: 1281 - DNA, 25 bp, Artificial Sequence
  Description of Artifical Sequence:  Primer/Probe
atggtgctacactacggatccgcag

SEQ ID NO: 1282 - DNA, 20 bp, Artificial Sequence
  Description of Artifical Sequence:  Primer/Probe
gtcacagaattctcgctcga

SEQ ID NO: 1283 - DNA, 20 bp, Artificial Sequence
  Description of Artifical Sequence:  Primer/Probe
accaagtgtgagggtgacta

SEQ ID NO: 1284 - DNA, 27 bp, Artificial Sequence
  Description of Artifical Sequence:  Primer/Probe
tcctggaaggaattataatccccaacc

SEQ ID NO: 1285 - DNA, 20 bp, Artificial Sequence
  Description of Artifical Sequence:  Primer/Probe
ccagtccacaaacacagaga

SEQ ID NO: 1286 - DNA, 22 bp, Artificial Sequence
  Description of Artifical Sequence:  Primer/Probe
atacatggaggtggctaaaacc

SEQ ID NO: 1287 - DNA, 29 bp, Artificial Sequence
  Description of Artifical Sequence:  Primer/Probe
tcataatcacggaattcacgctactacca

SEQ ID NO: 1288 - DNA, 22 bp, Artificial Sequence
  Description of Artifical Sequence:  Primer/Probe
acactagcaaattcaggctgaa

SEQ ID NO: 1289 - DNA, 22 bp, Artificial Sequence
  Description of Artifical Sequence:  Primer/Probe
gtcctggctttccagttagtct

SEQ ID NO: 1290 - DNA, 29 bp, Artificial Sequence
  Description of Artifical Sequence:  Primer/Probe
tcacctacatctggatcatattgaaacca

SEQ ID NO: 1291 - DNA, 22 bp, Artificial Sequence
  Description of Artifical Sequence:  Primer/Probe
ttgatgttagaagcagcacaaa

SEQ ID NO: 1292 - DNA, 22 bp, Artificial Sequence
  Description of Artifical Sequence:  Primer/Probe
gtcctggctttccagttagtct

SEQ ID NO: 1293 - DNA, 29 bp, Artificial Sequence
  Description of Artifical Sequence:  Primer/Probe
tcacctacatctggatcatattgaaacca

SEQ ID NO: 1294 - DNA, 22 bp, Artificial Sequence
  Description of Artifical Sequence:  Primer/Probe
ttgatgttagaagcagcacaaa

SEQ ID NO: 1295 - DNA, 22 bp, Artificial Sequence
  Description of Artifical Sequence:  Primer/Probe
atctgggtgcctgatatctttt

SEQ ID NO: 1296 - DNA, 30 bp, Artificial Sequence
  Description of Artifical Sequence:  Primer/Probe
tgtccactctaaaagatccttcatccatga

SEQ ID NO: 1297 - DNA, 22 bp, Artificial Sequence
  Description of Artifical Sequence:  Primer/Probe
cgcagcatgatattctccatag

SEQ ID NO: 1298 - DNA, 22 bp, Artificial Sequence
  Description of Artifical Sequence:  Primer/Probe
gtcctggctttccagttagtct

SEQ ID NO: 1299 - DNA, 29 bp, Artificial Sequence
  Description of Artifical Sequence:  Primer/Probe
tcacctacatctggatcatattgaaacca

SEQ ID NO: 1300 - DNA, 22 bp, Artificial Sequence
  Description of Artifical Sequence:  Primer/Probe
ttgatgttagaagcagcacaaa

SEQ ID NO: 1301 - DNA, 22 bp, Artificial Sequence
  Description of Artifical Sequence:  Primer/Probe
tggctttccagttagtctcctt

SEQ ID NO: 1302 - DNA, 28 bp, Artificial Sequence
  Description of Artifical Sequence:  Primer/Probe
cacctacatctggatcatattgaaacca

SEQ ID NO: 1303 - DNA, 22 bp, Artificial Sequence
  Description of Artifical Sequence:  Primer/Probe
ttgatgttagaagcagcacaaa

SEQ ID NO: 1304 - DNA, 22 bp, Artificial Sequence
  Description of Artifical Sequence:  Primer/Probe
cccctgatttacacagctttta

SEQ ID NO: 1305 - DNA, 26 bp, Artificial Sequence
  Description of Artifical Sequence:  Primer/Probe
acaacaatgccttcaagagcctcttt

SEQ ID NO: 1306 - DNA, 22 bp, Artificial Sequence
  Description of Artifical Sequence:  Primer/Probe
ccctgtgttcatctctgcttag

SEQ ID NO: 1307 - DNA, 22 bp, Artificial Sequence
  Description of Artifical Sequence:  Primer/Probe
cccctgatttacacagctttta

SEQ ID NO: 1308 - DNA, 26 bp, Artificial Sequence
  Description of Artifical Sequence:  Primer/Probe
acaacaatgccttcaagagcctcttt

SEQ ID NO: 1309 - DNA, 22 bp, Artificial Sequence
  Description of Artifical Sequence:  Primer/Probe
ccctgtgttcatctctgcttag

SEQ ID NO: 1310 - DNA, 22 bp, Artificial Sequence
  Description of Artifical Sequence:  Primer/Probe
cccctgatttacacagctttta

SEQ ID NO: 1311 - DNA, 26 bp, Artificial Sequence
  Description of Artifical Sequence:  Primer/Probe
acaacaatgccttcaagagcctcttt

SEQ ID NO: 1312 - DNA, 22 bp, Artificial Sequence
  Description of Artifical Sequence:  Primer/Probe
ccctgtgttcatctctgcttag

SEQ ID NO: 1313 - DNA, 22 bp, Artificial Sequence
  Description of Artifical Sequence:  Primer/Probe
cacggaacgtatcttcaagaaa

SEQ ID NO: 1314 - DNA, 26 bp, Artificial Sequence
  Description of Artifical Sequence:  Primer/Probe
ctgcacgtgtgaccctaactggactg

SEQ ID NO: 1315 - DNA, 22 bp, Artificial Sequence
  Description of Artifical Sequence:  Primer/Probe
gccacagtccacagaacatatt

SEQ ID NO: 1316 - DNA, 22 bp, Artificial Sequence
  Description of Artifical Sequence:  Primer/Probe
acctactcggccactacctaga

SEQ ID NO: 1317 - DNA, 29 bp, Artificial Sequence
  Description of Artifical Sequence:  Primer/Probe
caccctatcaagaagtgcttttaaattca

SEQ ID NO: 1318 - DNA, 22 bp, Artificial Sequence
  Description of Artifical Sequence:  Primer/Probe
cagtgcatttccagctacagta

SEQ ID NO: 1319 - DNA, 22 bp, Artificial Sequence
  Description of Artifical Sequence:  Primer/Probe
cagagaagcagacgagttcact

SEQ ID NO: 1320 - DNA, 26 bp, Artificial Sequence
  Description of Artifical Sequence:  Primer/Probe
caaggacagaattttaccctaaggca

SEQ ID NO: 1321 - DNA, 22 bp, Artificial Sequence
  Description of Artifical Sequence:  Primer/Probe
gttgctggttcacaaactccta

SEQ ID NO: 1322 - DNA, 21 bp, Artificial Sequence
  Description of Artifical Sequence:  Primer/Probe
aggaccaaggaaagatggttt

SEQ ID NO: 1323 - DNA, 26 bp, Artificial Sequence
  Description of Artifical Sequence:  Primer/Probe
tgcacccatgctgaatccccttatat

SEQ ID NO: 1324 - DNA, 22 bp, Artificial Sequence
  Description of Artifical Sequence:  Primer/Probe
aagccttcctttacctccttgt

SEQ ID NO: 1325 - DNA, 20 bp, Artificial Sequence
  Description of Artifical Sequence:  Primer/Probe
gccgtctctgtgtacctgca

SEQ ID NO: 1326 - DNA, 22 bp, Artificial Sequence
  Description of Artifical Sequence:  Primer/Probe
ttcgcccagctccaaggaccaa

SEQ ID NO: 1327 - DNA, 27 bp, Artificial Sequence
  Description of Artifical Sequence:  Primer/Probe
ttccatagaagagagaaaccatctttc

SEQ ID NO: 1328 - DNA, 22 bp, Artificial Sequence
  Description of Artifical Sequence:  Primer/Probe
cctagagctgatcgtctttgtg

SEQ ID NO: 1329 - DNA, 30 bp, Artificial Sequence
  Description of Artifical Sequence:  Primer/Probe
tcatcttttatctgctgactcttcttggca

SEQ ID NO: 1330 - DNA, 22 bp, Artificial Sequence
  Description of Artifical Sequence:  Primer/Probe
gaaagcaagacaatggtcatgt

SEQ ID NO: 1331 - DNA, 20 bp, Artificial Sequence
  Description of Artifical Sequence:  Primer/Probe
cctggctgtcatggcatatg

SEQ ID NO: 1332 - DNA, 23 bp, Artificial Sequence
  Description of Artifical Sequence:  Primer/Probe
tgctgcagtctgcaaacccctgc

SEQ ID NO: 1333 - DNA, 20 bp, Artificial Sequence
  Description of Artifical Sequence:  Primer/Probe
gacgtgggtgcatgatgatg

SEQ ID NO: 1334 - DNA, 20 bp, Artificial Sequence
  Description of Artifical Sequence:  Primer/Probe
cctggctgtcatggcatatg

SEQ ID NO: 1335 - DNA, 26 bp, Artificial Sequence
  Description of Artifical Sequence:  Primer/Probe
ctatgctgcagtctgcaaacccctgc

SEQ ID NO: 1336 - DNA, 20 bp, Artificial Sequence
  Description of Artifical Sequence:  Primer/Probe
gacgtgggtgcatgatgatg

SEQ ID NO: 1337 - DNA, 22 bp, Artificial Sequence
  Description of Artifical Sequence:  Primer/Probe
ttccctactggggacagaatat

SEQ ID NO: 1338 - DNA, 26 bp, Artificial Sequence
  Description of Artifical Sequence:  Primer/Probe
tacttttgtgaacctcctgccctcct

SEQ ID NO: 1339 - DNA, 22 bp, Artificial Sequence
  Description of Artifical Sequence:  Primer/Probe
gccatttctgtgctgtaagtgt

SEQ ID NO: 1340 - DNA, 21 bp, Artificial Sequence
  Description of Artifical Sequence:  Primer/Probe
ttgtgccaaaacatccatcct

SEQ ID NO: 1341 - DNA, 29 bp, Artificial Sequence
  Description of Artifical Sequence:  Primer/Probe
agcctggagaagctctcactcaacattgc

SEQ ID NO: 1342 - DNA, 20 bp, Artificial Sequence
  Description of Artifical Sequence:  Primer/Probe
tatgatgcggacctcccagt

SEQ ID NO: 1343 - DNA, 21 bp, Artificial Sequence
  Description of Artifical Sequence:  Primer/Probe
gacacgtgggagattttgatc

SEQ ID NO: 1344 - DNA, 26 bp, Artificial Sequence
  Description of Artifical Sequence:  Primer/Probe
agtgatccccggatctatcaccccaa

SEQ ID NO: 1345 - DNA, 26 bp, Artificial Sequence
  Description of Artifical Sequence:  Primer/Probe
acacctggatattctctttaatgtga

SEQ ID NO: 1346 - DNA, 22 bp, Artificial Sequence
  Description of Artifical Sequence:  Primer/Probe
catcagggtcttcaagagattg

SEQ ID NO: 1347 - DNA, 26 bp, Artificial Sequence
  Description of Artifical Sequence:  Primer/Probe
ccgagacattgggattcccttctcat

SEQ ID NO: 1348 - DNA, 22 bp, Artificial Sequence
  Description of Artifical Sequence:  Primer/Probe
acaaacccatatgttccactgt

SEQ ID NO: 1349 - DNA, 22 bp, Artificial Sequence
  Description of Artifical Sequence:  Primer/Probe
acagtggaacatatgggtttgt

SEQ ID NO: 1350 - DNA, 25 bp, Artificial Sequence
  Description of Artifical Sequence:  Primer/Probe
agaagctcagatccagcccacctgt

SEQ ID NO: 1351 - DNA, 22 bp, Artificial Sequence
  Description of Artifical Sequence:  Primer/Probe
catacacatcatccaggactga

SEQ ID NO: 1352 - DNA, 22 bp, Artificial Sequence
  Description of Artifical Sequence:  Primer/Probe
agccacatgtcttcgatctaca

SEQ ID NO: 1353 - DNA, 26 bp, Artificial Sequence
  Description of Artifical Sequence:  Primer/Probe
acaacatgttctgtgctggcttccat

SEQ ID NO: 1354 - DNA, 22 bp, Artificial Sequence
  Description of Artifical Sequence:  Primer/Probe
cccactatctccttgacatgaa

SEQ ID NO: 1355 - DNA, 20 bp, Artificial Sequence
  Description of Artifical Sequence:  Primer/Probe
gtgtcccatgaacagtttcg

SEQ ID NO: 1356 - DNA, 26 bp, Artificial Sequence
  Description of Artifical Sequence:  Primer/Probe
agcccaggagaccccagggaatactt

SEQ ID NO: 1357 - DNA, 21 bp, Artificial Sequence
  Description of Artifical Sequence:  Primer/Probe
tccccgattttgataaagttg

SEQ ID NO: 1358 - DNA, 19 bp, Artificial Sequence
  Description of Artifical Sequence:  Primer/Probe
tatggttggaaaatttgcc

SEQ ID NO: 1359 - DNA, 30 bp, Artificial Sequence
  Description of Artifical Sequence:  Primer/Probe
atacagctgagctgtatccaaccattgtaa

SEQ ID NO: 1360 - DNA, 20 bp, Artificial Sequence
  Description of Artifical Sequence:  Primer/Probe
ctgtcctaggagctgtggta

SEQ ID NO: 1361 - DNA, 22 bp, Artificial Sequence
  Description of Artifical Sequence:  Primer/Probe
tcagccagaccatagagaatgt

SEQ ID NO: 1362 - DNA, 25 bp, Artificial Sequence
  Description of Artifical Sequence:  Primer/Probe
atgctgaagcaccccaacatcattg

SEQ ID NO: 1363 - DNA, 22 bp, Artificial Sequence
  Description of Artifical Sequence:  Primer/Probe
ctccttcagacatacccctctt

SEQ ID NO: 1364 - DNA, 22 bp, Artificial Sequence
  Description of Artifical Sequence:  Primer/Probe
catagagaatgttcgccaagag

SEQ ID NO: 1365 - DNA, 25 bp, Artificial Sequence
  Description of Artifical Sequence:  Primer/Probe
atgctgaagcaccccaacatcattg

SEQ ID NO: 1366 - DNA, 22 bp, Artificial Sequence
  Description of Artifical Sequence:  Primer/Probe
ctccttcagacatacccctctt

SEQ ID NO: 1367 - DNA, 21 bp, Artificial Sequence
  Description of Artifical Sequence:  Primer/Probe
aatgagaggggtttcctgtct

SEQ ID NO: 1368 - DNA, 24 bp, Artificial Sequence
  Description of Artifical Sequence:  Primer/Probe
caggtcctgctccttctggtgctg

SEQ ID NO: 1369 - DNA, 19 bp, Artificial Sequence
  Description of Artifical Sequence:  Primer/Probe
caacgatccgactggacat

SEQ ID NO: 1370 - DNA, 21 bp, Artificial Sequence
  Description of Artifical Sequence:  Primer/Probe
aatgagaggggtttcctgtct

SEQ ID NO: 1371 - DNA, 24 bp, Artificial Sequence
  Description of Artifical Sequence:  Primer/Probe
caggtcctgctccttctggtgctg

SEQ ID NO: 1372 - DNA, 20 bp, Artificial Sequence
  Description of Artifical Sequence:  Primer/Probe
gcagacttccttccctgagt

SEQ ID NO: 1373 - DNA, 22 bp, Artificial Sequence
  Description of Artifical Sequence:  Primer/Probe
ctacaaagcatttgggacatgt

SEQ ID NO: 1374 - DNA, 26 bp, Artificial Sequence
  Description of Artifical Sequence:  Primer/Probe
cataggtgccatcctgtccacctaca

SEQ ID NO: 1375 - DNA, 22 bp, Artificial Sequence
  Description of Artifical Sequence:  Primer/Probe
ggtgcatgactgaagagatgac

SEQ ID NO: 1376 - DNA, 23 bp, Artificial Sequence
  Description of Artifical Sequence:  Primer/Probe
ctacacgacggtcctgactgggt

SEQ ID NO: 1377 - DNA, 30 bp, Artificial Sequence
  Description of Artifical Sequence:  Primer/Probe
catcaccaagattggcatggctgctgtggc

SEQ ID NO: 1378 - DNA, 22 bp, Artificial Sequence
  Description of Artifical Sequence:  Primer/Probe
aaggggagtggagtcattagtg

SEQ ID NO: 1379 - DNA, 22 bp, Artificial Sequence
  Description of Artifical Sequence:  Primer/Probe
catattctggttcagggatcag

SEQ ID NO: 1380 - DNA, 26 bp, Artificial Sequence
  Description of Artifical Sequence:  Primer/Probe
caacttctttgcctgtctggtccaga

SEQ ID NO: 1381 - DNA, 22 bp, Artificial Sequence
  Description of Artifical Sequence:  Primer/Probe
atggagaaggagtgaaggaaga

SEQ ID NO: 1382 - DNA, 22 bp, Artificial Sequence
  Description of Artifical Sequence:  Primer/Probe
agagacaatccaaagccttttc

SEQ ID NO: 1383 - DNA, 26 bp, Artificial Sequence
  Description of Artifical Sequence:  Primer/Probe
caactgtgtgcctcacctcattgttg

SEQ ID NO: 1384 - DNA, 22 bp, Artificial Sequence
  Description of Artifical Sequence:  Primer/Probe
agaccctggctttaaataagca

SEQ ID NO: 1385 - DNA, 22 bp, Artificial Sequence
  Description of Artifical Sequence:  Primer/Probe
agagacaatccaaagccttttc

SEQ ID NO: 1386 - DNA, 26 bp, Artificial Sequence
  Description of Artifical Sequence:  Primer/Probe
caactgtgtgcctcacctcattgttg

SEQ ID NO: 1387 - DNA, 22 bp, Artificial Sequence
  Description of Artifical Sequence:  Primer/Probe
agaccctggctttaaataagca

SEQ ID NO: 1388 - DNA, 22 bp, Artificial Sequence
  Description of Artifical Sequence:  Primer/Probe
gactcgcaagatcaagcatcta

SEQ ID NO: 1389 - DNA, 26 bp, Artificial Sequence
  Description of Artifical Sequence:  Primer/Probe
cttcttcatcaccgctgcttggagta

SEQ ID NO: 1390 - DNA, 22 bp, Artificial Sequence
  Description of Artifical Sequence:  Primer/Probe
tagagccagatgtaggcaaaga

SEQ ID NO: 1391 - DNA, 21 bp, Artificial Sequence
  Description of Artifical Sequence:  Primer/Probe
gaaagccagtattgggtgaac

SEQ ID NO: 1392 - DNA, 27 bp, Artificial Sequence
  Description of Artifical Sequence:  Primer/Probe
ccccaaactagaagtcatcattgaaga

SEQ ID NO: 1393 - DNA, 22 bp, Artificial Sequence
  Description of Artifical Sequence:  Primer/Probe
tttgtccaccgtagtcttgaac

SEQ ID NO: 1394 - DNA, 21 bp, Artificial Sequence
  Description of Artifical Sequence:  Primer/Probe
ggggagttggaattcaagaat

SEQ ID NO: 1395 - DNA, 28 bp, Artificial Sequence
  Description of Artifical Sequence:  Primer/Probe
tgaaactgtcaaaacaattcacatcaag

SEQ ID NO: 1396 - DNA, 25 bp, Artificial Sequence
  Description of Artifical Sequence:  Primer/Probe
tctcatatgcctcatcatcaattac

SEQ ID NO: 1397 - DNA, 21 bp, Artificial Sequence
  Description of Artifical Sequence:  Primer/Probe
gaaagccagtattgggtgaac

SEQ ID NO: 1398 - DNA, 27 bp, Artificial Sequence
  Description of Artifical Sequence:  Primer/Probe
ccccaaactagaagtcatcattgaaga

SEQ ID NO: 1399 - DNA, 22 bp, Artificial Sequence
  Description of Artifical Sequence:  Primer/Probe
tttgtccaccgtagtcttgaac

SEQ ID NO: 1400 - DNA, 24 bp, Artificial Sequence
  Description of Artifical Sequence:  Primer/Probe
gtagatgaggaggaatacgaaagg

SEQ ID NO: 1401 - DNA, 26 bp, Artificial Sequence
  Description of Artifical Sequence:  Primer/Probe
aatttcttcattgcccttggtgaacc

SEQ ID NO: 1402 - DNA, 22 bp, Artificial Sequence
  Description of Artifical Sequence:  Primer/Probe
gatattccacgttccatccatt

SEQ ID NO: 1403 - DNA, 22 bp, Artificial Sequence
  Description of Artifical Sequence:  Primer/Probe
gtcagcttctcttgctttgaga

SEQ ID NO: 1404 - DNA, 23 bp, Artificial Sequence
  Description of Artifical Sequence:  Primer/Probe
cactgtcaggcactcgccaatgt

SEQ ID NO: 1405 - DNA, 22 bp, Artificial Sequence
  Description of Artifical Sequence:  Primer/Probe
ctgtatttctggaagcattcca

SEQ ID NO: 1406 - DNA, 22 bp, Artificial Sequence
  Description of Artifical Sequence:  Primer/Probe
ttgatgtctctgagatccaaca

SEQ ID NO: 1407 - DNA, 26 bp, Artificial Sequence
  Description of Artifical Sequence:  Primer/Probe
agtttccgagctctgggcatttccat

SEQ ID NO: 1408 - DNA, 21 bp, Artificial Sequence
  Description of Artifical Sequence:  Primer/Probe
catgctgtgcaaaattttctc

SEQ ID NO: 1409 - DNA, 22 bp, Artificial Sequence
  Description of Artifical Sequence:  Primer/Probe
ctccctcacctccatctttaac

SEQ ID NO: 1410 - DNA, 26 bp, Artificial Sequence
  Description of Artifical Sequence:  Primer/Probe
ccatcttcaccatggacctctggaat

SEQ ID NO: 1411 - DNA, 22 bp, Artificial Sequence
  Description of Artifical Sequence:  Primer/Probe
atcatgagctccttctcagatg

SEQ ID NO: 1412 - DNA, 20 bp, Artificial Sequence
  Description of Artifical Sequence:  Primer/Probe
agcgggcaactcttcatcta

SEQ ID NO: 1413 - DNA, 24 bp, Artificial Sequence
  Description of Artifical Sequence:  Primer/Probe
atgcagtcagtgaccagctccctg

SEQ ID NO: 1414 - DNA, 22 bp, Artificial Sequence
  Description of Artifical Sequence:  Primer/Probe
caggacaaagactgcagtcact

SEQ ID NO: 1415 - DNA, 19 bp, Artificial Sequence
  Description of Artifical Sequence:  Primer/Probe
tcatagtggcactcatcgg

SEQ ID NO: 1416 - DNA, 30 bp, Artificial Sequence
  Description of Artifical Sequence:  Primer/Probe
aactcttcatctacatgcagtcagtgacca

SEQ ID NO: 1417 - DNA, 19 bp, Artificial Sequence
  Description of Artifical Sequence:  Primer/Probe
ctatcaggcccaggacaaa

SEQ ID NO: 1418 - DNA, 22 bp, Artificial Sequence
  Description of Artifical Sequence:  Primer/Probe
gctgtgtggctcaagtctattt

SEQ ID NO: 1419 - DNA, 26 bp, Artificial Sequence
  Description of Artifical Sequence:  Primer/Probe
ttctctgcctttgcatctgctgagct

SEQ ID NO: 1420 - DNA, 22 bp, Artificial Sequence
  Description of Artifical Sequence:  Primer/Probe
agcggtcataagacatgacagt

SEQ ID NO: 1421 - DNA, 22 bp, Artificial Sequence
  Description of Artifical Sequence:  Primer/Probe
ggtatgtgcctgccctattatt

SEQ ID NO: 1422 - DNA, 30 bp, Artificial Sequence; identical to SEQ ID NO: 1212
  Description of Artifical Sequence:  Primer/Probe

SEQ ID NO: 1423 - DNA, 22 bp, Artificial Sequence
  Description of Artifical Sequence:  Primer/Probe
gccattctgtttgcaattatgt

SEQ ID NO: 1424 - DNA, 22 bp, Artificial Sequence
  Description of Artifical Sequence:  Primer/Probe
ggtatgtgcctgccctattatt

SEQ ID NO: 1425 - DNA, 30 bp, Artificial Sequence; identical to SEQ ID NO: 1212
  Description of Artifical Sequence:  Primer/Probe

SEQ ID NO: 1426 - DNA, 22 bp, Artificial Sequence
  Description of Artifical Sequence:  Primer/Probe
gccattctgtttgcaattatgt

SEQ ID NO: 1427 - DNA, 22 bp, Artificial Sequence
  Description of Artifical Sequence:  Primer/Probe
tgccagaaattcatttcctaaa

SEQ ID NO: 1428 - DNA, 26 bp, Artificial Sequence
  Description of Artifical Sequence:  Primer/Probe
ccttggaaagcctgcccactagtttt

SEQ ID NO: 1429 - DNA, 22 bp, Artificial Sequence
  Description of Artifical Sequence:  Primer/Probe
agtgtgatgtagtggggacttg

SEQ ID NO: 1430 - DNA, 22 bp, Artificial Sequence
  Description of Artifical Sequence:  Primer/Probe
tgccagaaattcatttcctaaa

SEQ ID NO: 1431 - DNA, 26 bp, Artificial Sequence
  Description of Artifical Sequence:  Primer/Probe
ccttggaaagcctgcccactagtttt

SEQ ID NO: 1432 - DNA, 22 bp, Artificial Sequence
  Description of Artifical Sequence:  Primer/Probe
agtgtgatgtagtggggacttg

SEQ ID NO: 1433 - DNA, 22 bp, Artificial Sequence
  Description of Artifical Sequence:  Primer/Probe
gacatggtggacagtgagatct

SEQ ID NO: 1434 - DNA, 26 bp, Artificial Sequence
  Description of Artifical Sequence:  Primer/Probe
cctctctcaccccaacatcgtgaaat

SEQ ID NO: 1435 - DNA, 22 bp, Artificial Sequence
  Description of Artifical Sequence:  Primer/Probe
tctgtttcgtagacttcatgca

SEQ ID NO: 1436 - DNA, 22 bp, Artificial Sequence
  Description of Artifical Sequence:  Primer/Probe
gaaattggctgattttggactt

SEQ ID NO: 1437 - DNA, 27 bp, Artificial Sequence
  Description of Artifical Sequence:  Primer/Probe
cctatatttactgtgtgtgggacccca

SEQ ID NO: 1438 - DNA, 22 bp, Artificial Sequence
  Description of Artifical Sequence:  Primer/Probe
agaatttcgggagctacgtaag

SEQ ID NO: 1439 - DNA, 22 bp, Artificial Sequence
  Description of Artifical Sequence:  Primer/Probe
gacatggtggacagtgagatct

SEQ ID NO: 1440 - DNA, 26 bp, Artificial Sequence
  Description of Artifical Sequence:  Primer/Probe
cctctctcaccccaacatcgtgaaat

SEQ ID NO: 1441 - DNA, 22 bp, Artificial Sequence
  Description of Artifical Sequence:  Primer/Probe
tctgtttcgtagacttcatgca

SEQ ID NO: 1442 - DNA, 22 bp, Artificial Sequence
  Description of Artifical Sequence:  Primer/Probe
gaaattggctgattttggactt

SEQ ID NO: 1443 - DNA, 27 bp, Artificial Sequence
  Description of Artifical Sequence:  Primer/Probe
cctatatttactgtgtgtgggacccca

SEQ ID NO: 1444 - DNA, 22 bp, Artificial Sequence
  Description of Artifical Sequence:  Primer/Probe
agaatttcgggagctacgtaag

SEQ ID NO: 1445 - DNA, 22 bp, Artificial Sequence
  Description of Artifical Sequence:  Primer/Probe
gaaattggctgattttggactt

SEQ ID NO: 1446 - DNA, 27 bp, Artificial Sequence
  Description of Artifical Sequence:  Primer/Probe
cctatatttactgtgtgtgggacccca

SEQ ID NO: 1447 - DNA, 22 bp, Artificial Sequence
  Description of Artifical Sequence:  Primer/Probe
agaatttcgggagctacgtaag

SEQ ID NO: 1448 - DNA, 22 bp, Artificial Sequence
  Description of Artifical Sequence:  Primer/Probe
gacatggtggacagtgagatct

SEQ ID NO: 1449 - DNA, 26 bp, Artificial Sequence
  Description of Artifical Sequence:  Primer/Probe
atccagagcctctctcaccccaacat

SEQ ID NO: 1450 - DNA, 22 bp, Artificial Sequence
  Description of Artifical Sequence:  Primer/Probe
tcgtagacttcatgcaatttca

SEQ ID NO: 1451 - DNA, 20 bp, Artificial Sequence
  Description of Artifical Sequence:  Primer/Probe
ctgtgtccctgtgtcctgaa

SEQ ID NO: 1452 - DNA, 26 bp, Artificial Sequence
  Description of Artifical Sequence:  Primer/Probe
tcaacagaacttgctaccctcatcga

SEQ ID NO: 1453 - DNA, 22 bp, Artificial Sequence
  Description of Artifical Sequence:  Primer/Probe
gtgggtcttctcctgaaacttc

SEQ ID NO: 1454 - DNA, 22 bp, Artificial Sequence
  Description of Artifical Sequence:  Primer/Probe
cgctacagatgttcaagatcct

SEQ ID NO: 1455 - DNA, 26 bp, Artificial Sequence
  Description of Artifical Sequence:  Primer/Probe
ctacagccagagcgtcctctacctgg

SEQ ID NO: 1456 - DNA, 22 bp, Artificial Sequence
  Description of Artifical Sequence:  Primer/Probe
cctggaagtcactgaacttgac

SEQ ID NO: 1457 - DNA, 22 bp, Artificial Sequence
  Description of Artifical Sequence:  Primer/Probe
cgctacagatgttcaagatcct

SEQ ID NO: 1458 - DNA, 26 bp, Artificial Sequence
  Description of Artifical Sequence:  Primer/Probe
ctacagccagagcgtcctctacctgg

SEQ ID NO: 1459 - DNA, 22 bp, Artificial Sequence
  Description of Artifical Sequence:  Primer/Probe
cctggaagtcactgaacttgac

SEQ ID NO: 1460 - DNA, 18 bp, Artificial Sequence
  Description of Artifical Sequence:  Primer/Probe
ctctgcactccatggccc

SEQ ID NO: 1461 - DNA, 25 bp, Artificial Sequence
  Description of Artifical Sequence:  Primer/Probe
cctggagtgcagcctcaagttcgtc

SEQ ID NO: 1462 - DNA, 20 bp, Artificial Sequence
  Description of Artifical Sequence:  Primer/Probe
gtctcccgtgatcatgaaca

SEQ ID NO: 1463 - DNA, 22 bp, Artificial Sequence
  Description of Artifical Sequence:  Primer/Probe
ccatttactggtgcacagaagt

SEQ ID NO: 1464 - DNA, 26 bp, Artificial Sequence
  Description of Artifical Sequence:  Primer/Probe
atccctctggctgtcacctctctcat

SEQ ID NO: 1465 - DNA, 22 bp, Artificial Sequence
  Description of Artifical Sequence:  Primer/Probe
ggagtccagaatctggaagagt

SEQ ID NO: 1466 - DNA, 22 bp, Artificial Sequence
  Description of Artifical Sequence:  Primer/Probe
ccatttactggtgcacagaagt

SEQ ID NO: 1467 - DNA, 26 bp, Artificial Sequence
  Description of Artifical Sequence:  Primer/Probe
atccctctggctgtcacctctctcat

SEQ ID NO: 1468 - DNA, 22 bp, Artificial Sequence
  Description of Artifical Sequence:  Primer/Probe
ggagtccagaatctggaagagt

SEQ ID NO: 1469 - DNA, 22 bp, Artificial Sequence
  Description of Artifical Sequence:  Primer/Probe
agagtgacctcaatcctgttca

SEQ ID NO: 1470 - DNA, 26 bp, Artificial Sequence
  Description of Artifical Sequence:  Primer/Probe
acgtggctgtccttctcaccagaaag

SEQ ID NO: 1471 - DNA, 22 bp, Artificial Sequence
  Description of Artifical Sequence:  Primer/Probe
gattgaaaccagcacagatgtc

SEQ ID NO: 1472 - DNA, 22 bp, Artificial Sequence
  Description of Artifical Sequence:  Primer/Probe
ccacgttggctctagcttatta

SEQ ID NO: 1473 - DNA, 26 bp, Artificial Sequence
  Description of Artifical Sequence:  Primer/Probe
tgaagatctccccaataacatggaca

SEQ ID NO: 1474 - DNA, 22 bp, Artificial Sequence
  Description of Artifical Sequence:  Primer/Probe
ttcgaagtactccagggatatg

SEQ ID NO: 1475 - DNA, 21 bp, Artificial Sequence
  Description of Artifical Sequence:  Primer/Probe
aggagcaacgtcctctgtaac

SEQ ID NO: 1476 - DNA, 26 bp, Artificial Sequence
  Description of Artifical Sequence:  Primer/Probe
cttccaaccacactgagcggtttgag

SEQ ID NO: 1477 - DNA, 20 bp, Artificial Sequence
  Description of Artifical Sequence:  Primer/Probe
agcatgtcgtccttgatgag

SEQ ID NO: 1478 - DNA, 21 bp, Artificial Sequence
  Description of Artifical Sequence:  Primer/Probe
aggagcaacgtcctctgtaac

SEQ ID NO: 1479 - DNA, 26 bp, Artificial Sequence
  Description of Artifical Sequence:  Primer/Probe
cttccaaccacactgagcggtttgag

SEQ ID NO: 1480 - DNA, 20 bp, Artificial Sequence
  Description of Artifical Sequence:  Primer/Probe
agcatgtcgtccttgatgag

SEQ ID NO: 1481 - DNA, 21 bp, Artificial Sequence
  Description of Artifical Sequence:  Primer/Probe
aggagcaacgtcctctgtaac

SEQ ID NO: 1482 - DNA, 26 bp, Artificial Sequence
  Description of Artifical Sequence:  Primer/Probe
cttccaaccacactgagcggtttgag

SEQ ID NO: 1483 - DNA, 20 bp, Artificial Sequence
  Description of Artifical Sequence:  Primer/Probe
agcatgtcgtccttgatgag

SEQ ID NO: 1484 - DNA, 21 bp, Artificial Sequence
  Description of Artifical Sequence:  Primer/Probe
aggagcaacgtcctctgtaac

SEQ ID NO: 1485 - DNA, 26 bp, Artificial Sequence
  Description of Artifical Sequence:  Primer/Probe
cttccaaccacactgagcggtttgag

SEQ ID NO: 1486 - DNA, 20 bp, Artificial Sequence
  Description of Artifical Sequence:  Primer/Probe
agcatgtcgtccttgatgag

SEQ ID NO: 1487 - DNA, 21 bp, Artificial Sequence
  Description of Artifical Sequence:  Primer/Probe
aggagcaacgtcctctgtaac

SEQ ID NO: 1488 - DNA, 26 bp, Artificial Sequence
  Description of Artifical Sequence:  Primer/Probe
cttccaaccacactgagcggtttgag

SEQ ID NO: 1489 - DNA, 20 bp, Artificial Sequence
  Description of Artifical Sequence:  Primer/Probe
acagcatgtcgtccttgatg

SEQ ID NO: 1490 - DNA, 20 bp, Artificial Sequence
  Description of Artifical Sequence:  Primer/Probe
caggagcaacgtcctctgta

SEQ ID NO: 1491 - DNA, 26 bp, Artificial Sequence
  Description of Artifical Sequence:  Primer/Probe
cttccaaccacactgagcggtttgag

SEQ ID NO: 1492 - DNA, 19 bp, Artificial Sequence
  Description of Artifical Sequence:  Primer/Probe
cacacagcatgtcgtcctt

SEQ ID NO: 1493 - DNA, 20 bp, Artificial Sequence
  Description of Artifical Sequence:  Primer/Probe
gacggtgaaggtcaggagca

SEQ ID NO: 1494 - DNA, 19 bp, Artificial Sequence
  Description of Artifical Sequence:  Primer/Probe
cctgtcgccgccgctttcc

SEQ ID NO: 1495 - DNA, 19 bp, Artificial Sequence
  Description of Artifical Sequence:  Primer/Probe
aaccgctcagtgtggttgg

SEQ ID NO: 1496 - DNA, 20 bp, Artificial Sequence
  Description of Artifical Sequence:  Primer/Probe
ctggccaagagctacaatga

SEQ ID NO: 1497 - DNA, 26 bp, Artificial Sequence
  Description of Artifical Sequence:  Primer/Probe
catcagacagaacgtgcaggtgtttg

SEQ ID NO: 1498 - DNA, 20 bp, Artificial Sequence
  Description of Artifical Sequence:  Primer/Probe
aggccatctatggctttcat

SEQ ID NO: 1499 - DNA, 22 bp, Artificial Sequence
  Description of Artifical Sequence:  Primer/Probe
ataggaaaatggacgcctacat

SEQ ID NO: 1500 - DNA, 26 bp, Artificial Sequence
  Description of Artifical Sequence:  Primer/Probe
ccattgccggtctctgtaaacctgaa

SEQ ID NO: 1501 - DNA, 22 bp, Artificial Sequence
  Description of Artifical Sequence:  Primer/Probe
ttttgaaaatcgacaggaactg

SEQ ID NO: 1502 - DNA, 22 bp, Artificial Sequence
  Description of Artifical Sequence:  Primer/Probe
gcaattgagaacaacatggatt

SEQ ID NO: 1503 - DNA, 26 bp, Artificial Sequence
  Description of Artifical Sequence:  Primer/Probe
caaattaaagcaagaaacccctgcag

SEQ ID NO: 1504 - DNA, 22 bp, Artificial Sequence
  Description of Artifical Sequence:  Primer/Probe
tgttggctttatgcaaatcttc

SEQ ID NO: 1505 - DNA, 22 bp, Artificial Sequence
  Description of Artifical Sequence:  Primer/Probe
cagcttgttcgttccatattgt

SEQ ID NO: 1506 - DNA, 29 bp, Artificial Sequence
  Description of Artifical Sequence:  Primer/Probe
tcccaaaccaactgattttaaactctaca

SEQ ID NO: 1507 - DNA, 22 bp, Artificial Sequence
  Description of Artifical Sequence:  Primer/Probe
agcaactgccacaagacatagt

SEQ ID NO: 1508 - DNA, 22 bp, Artificial Sequence
  Description of Artifical Sequence:  Primer/Probe
cttgatgaagaaagcagaggaa

SEQ ID NO: 1509 - DNA, 26 bp, Artificial Sequence
  Description of Artifical Sequence:  Primer/Probe
atccagatcaaccaaggctcaccatt

SEQ ID NO: 1510 - DNA, 22 bp, Artificial Sequence
  Description of Artifical Sequence:  Primer/Probe
agtcaggggcaatctgagatat

SEQ ID NO: 1511 - DNA, 20 bp, Artificial Sequence
  Description of Artifical Sequence:  Primer/Probe
cctccactcagccatgatta

SEQ ID NO: 1512 - DNA, 26 bp, Artificial Sequence
  Description of Artifical Sequence:  Primer/Probe
ataccgagacctgaaaccccacaatg

SEQ ID NO: 1513 - DNA, 20 bp, Artificial Sequence
  Description of Artifical Sequence:  Primer/Probe
gcagcattgggatacagtgt

SEQ ID NO: 1514 - DNA, 22 bp, Artificial Sequence
  Description of Artifical Sequence:  Primer/Probe
ggcacaaagattttctcctttt

SEQ ID NO: 1515 - DNA, 27 bp, Artificial Sequence
  Description of Artifical Sequence:  Primer/Probe
tgatttcaccattcagaaactcattga

SEQ ID NO: 1516 - DNA, 22 bp, Artificial Sequence
  Description of Artifical Sequence:  Primer/Probe
gaaaacagttggcttgttcttg

SEQ ID NO: 1517 - DNA, 22 bp, Artificial Sequence
  Description of Artifical Sequence:  Primer/Probe
gtaaagccagtggaaatgaaga

SEQ ID NO: 1518 - DNA, 26 bp, Artificial Sequence
  Description of Artifical Sequence:  Primer/Probe
tcttccaatcctactgttgctgtgcg

SEQ ID NO: 1519 - DNA, 21 bp, Artificial Sequence
  Description of Artifical Sequence:  Primer/Probe
caatggataggctgagcaaac

SEQ ID NO: 1520 - DNA, 21 bp, Artificial Sequence
  Description of Artifical Sequence:  Primer/Probe
gggtacgatggctgaagtaaa

SEQ ID NO: 1521 - DNA, 26 bp, Artificial Sequence
  Description of Artifical Sequence:  Primer/Probe
ccagttttctgccacacaacatgctt

SEQ ID NO: 1522 - DNA, 22 bp, Artificial Sequence
  Description of Artifical Sequence:  Primer/Probe
ttatgcagtgttcccaaatttc

SEQ ID NO: 1523 - DNA, 22 bp, Artificial Sequence
  Description of Artifical Sequence:  Primer/Probe
caggtgccacgtctaactagat

SEQ ID NO: 1524 - DNA, 27 bp, Artificial Sequence
  Description of Artifical Sequence:  Primer/Probe
tgttgtttgaaacatctacatccacca

SEQ ID NO: 1525 - DNA, 22 bp, Artificial Sequence
  Description of Artifical Sequence:  Primer/Probe
gaaatttgggaacactgcataa

SEQ ID NO: 1526 - DNA, 22 bp, Artificial Sequence
  Description of Artifical Sequence:  Primer/Probe
accactatggtgaggctacaga

SEQ ID NO: 1527 - DNA, 23 bp, Artificial Sequence
  Description of Artifical Sequence:  Primer/Probe
ctatgggccgctcccgagacact

SEQ ID NO: 1528 - DNA, 20 bp, Artificial Sequence
  Description of Artifical Sequence:  Primer/Probe
agagctgaagtggccaaact

SEQ ID NO: 1529 - DNA, 18 bp, Artificial Sequence
  Description of Artifical Sequence:  Primer/Probe
gccgctcccgagacactt

SEQ ID NO: 1530 - DNA, 25 bp, Artificial Sequence
  Description of Artifical Sequence:  Primer/Probe
ccacttcagctctgccagtgacgtg

SEQ ID NO: 1531 - DNA, 19 bp, Artificial Sequence
  Description of Artifical Sequence:  Primer/Probe
cccacatgatgatgccgaa

SEQ ID NO: 1532 - DNA, 22 bp, Artificial Sequence
  Description of Artifical Sequence:  Primer/Probe
tggttttcttcagcactgtgat

SEQ ID NO: 1533 - DNA, 27 bp, Artificial Sequence
  Description of Artifical Sequence:  Primer/Probe
catgctgtactaccctggactgatgca

SEQ ID NO: 1534 - DNA, 22 bp, Artificial Sequence
  Description of Artifical Sequence:  Primer/Probe
catgatccatccaacctttcta

SEQ ID NO: 1535 - DNA, 22 bp, Artificial Sequence
  Description of Artifical Sequence:  Primer/Probe
gatatttcgaatccatttctgg

SEQ ID NO: 1536 - DNA, 20 bp, Artificial Sequence
  Description of Artifical Sequence:  Primer/Probe
catcattcagcttcacacac

SEQ ID NO: 1537 - DNA, 20 bp, Artificial Sequence
  Description of Artifical Sequence:  Primer/Probe
gaacctctgcaggcgcatag

SEQ ID NO: 1538 - DNA, 21 bp, Artificial Sequence
  Description of Artifical Sequence:  Primer/Probe
cactggaaaatgaataaggta

SEQ ID NO: 1539 - DNA, 20 bp, Artificial Sequence
  Description of Artifical Sequence:  Primer/Probe
ccatgttaatattcatcaga

SEQ ID NO: 1540 - DNA, 17 bp, Artificial Sequence
  Description of Artifical Sequence:  Primer/Probe
gagctcccaggctcaga
